United States Patent Application Publication US 2025/0223376 A1 - sequence listing, part 3

SEQ ID NO: 4000 - DNA, 2217 bp, synthetic construct
  misc_feature 1..2217: note = source = /note="Description of Artificial Sequence: Synthetic polynucleotide"
  source 1..2217: mol_type = other DNA
atggctgccgatggttatcttccagattggctcgaggacaacctctctgagggcattcgcgagtggtgggcgctgaaacctggagccccgaagcccaaagccaaccagcaaaagcaggacgacggccggggtctggtgcttcctggctacaagtacctcggacccttcaacggactcgacaagggggagcccgtcaacgcggcggacgcagcggccctcgagcacgacaaggcctacgaccagcagctgcaggcgggtgacaatccgtaccagcggtataaccacgccgacgccgagtttcaggagcgtctgcaagaagatacgtcttttgggggcaacctcgggcgagcagtcttccaggccaagaagcgggttctcgaacctctcggtctggttgaggaaggcgctaagacggctcctggaaagaagagaccggtagagccatcaccccagcgttctccagactcctctacgggcatcggcaagaaaggccaacagcccgccagaaaaagactcaattttggtcagactggcgactcagagtcagttccagaccctcaacctctcggagaacctccagcagcgccctctggtgtgggacctaatacaatggctgcaggcggtggcgcaccaatggcagacaataacgaaggcgccgacggagtgggtagttcctcgggaaattggcattgcgattccgcatggctgggcgacagagtcatcaccaccagcacccgaacctgggccctgcccacctacaacaaccacctctacaagcaaatctccaacgggacatcgggaggagccaccaacgacaacacctacttcggctacagcaccccctgggggtattttgactttaacagattccactgccacttttcaccacgtgactggcagcgactcatcaacaacaactggggattccggcccaagagactcagcttcaagctcttcaacatccaggtcaaggaggtcacgcagaatgaaggcaccaagaccatcgccaataacctcaccagcaccatccaggtgtttacggactcggagtaccagctgccgtacgttctcggctctgcccaccagggctgcctgcctccgttcccggcggacgtgttcacgattccccagtacggctacctaacactcaacaacggtagtcaggccgtgggacgctcctccttctactgcctggaatactttccttcgcagatgctgagaaccggcaacaacttccagtttacttacaccttcgaggacgtgcctttccacagcagctacgcccacagccagagcttggaccggctgatgaatcctctgattgaccagtacctgtactacttgtctcggactcaaacaacaggaggcacggcaaatacgcagactctgggcttcagccaaggtgggcctaatacaatggccaatcaggcaaagaactggctgccaggaccctgttaccgccaacaacgcgtctcaacgacaaccgggcaaaacaacaatagcaactttgcctggactgctgggaccaaataccatctgaatggaagaaattcattggctaatcctggcatcgctatggcaacacacaaagacgacgaggagcgtttttttcccagtaacgggatcctgatttttggcaaacaaaatgctgccagagacaatgcggattacagcgatgtcatgctcaccagcgaggaagaaatcaaaaccactaaccctgtggctacagaggaatacggtatcgtggcagataacttgcagcagcaaaacacggctcctcaaattggaactgtcaacagccagggggccttacccggtatggtctggcagaaccgggacgtgtacctgcagggtcccatctgggccaagattcctcacacggacggcaacttccacccgtctccgctgatgggcggctttggcctgaaacatcctccgcctcagatcctgatcaagaacacgcctgtacctgcggatcctccgaccaccttcaaccagtcaaagctgaactctttcatcacgcaatacagcaccggacaggtcagcgtggaaattgaatgggagctgcagaaggaaaacagcaagcgctggaaccccgagatccagtacacctccaactactacaaatctacaagtgtggactttgctgttaatacagaaggcgtgtactctgaaccccgccccattggcacccgttacctcacccgtaatctgtaa

SEQ ID NO: 4001 - DNA, 2217 bp, synthetic construct
  misc_feature 1..2217: note = source = /note="Description of Artificial Sequence: Synthetic polynucleotide"
  source 1..2217: mol_type = other DNA
atggctgccgatggttatcttccagattggctcgaggacaacctctctgagggcattcgcgagtggtgggcgctgaaacctggagccccgaagcccaaagccaaccagcaaaagcaggacgacggccggggtctggtgcttcctggctacaagtacctcggacccttcaacggactcgacaagggggagcccgtcaacgcggcggacacggcggccctcgagcacgacaaggcctacgaccagcagctgcaggcgggtgacaatccgtacctgcggtataaccacgccgacgccgagtttcaggagcgtctgcaagaagatacgtcttttgggggcaacctcgggcgagcagtcttccaggccaagaagcgggttctcgaacctctcggtctggttgaggaaggcgctaagacggctcctggaaagaagagaccggtagagccatcaccccagcgttctccagactcctctacgggcatcggcaagaaaggccaacagcccgccagaaaaagactcaattttggtcagactggcgactcagagtcagttccagaccctcaacctctcggagaacctccagcagcgccctctggtgtgggacctaatacaatggctgcaggcggtggcgcaccaatggcagacaataacgaaggcgccgacggagtgggtagttcctcgggaaattggcattgcgattccacatggctgggcgacagagtcatcaccaccagcacccgaacctgggccctgcccacctacaacaaccacctctacaagcaaatctccaacgggacatcgggaggagccaccaacgacaacacctacttcggctacagcaccccctgggggtattttgactttaacagattccactgccacttttcaccacgtgactggcagcgactcatcaacaacaactggggattccggcccaagagactcagcttcaagctcttcaacatccaggtcaaggaggtcacgcagaatgaaggcaccaagaccatcgccaataacctcaccagcaccatccaggtgtttacggactcggagtaccagctgccgtacgttctcggctctgcccaccagggctgcctgcctccgttcccggcggacgtgttcatgattccccagtacggctacctaacactcaacaacggtagtcaggccgtgggacgctcctccttctactgcctggaatactttccttcgcagatgctgagaaccggcaacaacttccagtttacttacaccttcgaggacgtgcctttccacagcagctacgcccacagccagagcttggaccggctgatgaatcctctgattgaccagtacctgtactacttgtctcggactcaaacaacaggaggcacggcaaatacgcagactctgggcttcagccaaggtgggcctaatacaatggccaatcaggcaaagaactggctgccaggaccctgttaccgccaacaacgcgtctcaacgacaaccgggcaaaacaacaatagcaactttgcctggactgctgggaccaaataccatctgaatggaagaaattcattggctaatcctggcatcgctatggcaacacacaaagacgacgaggagcgtttttttcccagtaacgggatcctgatttttggcaaacaaaatgctgccagagacaatgcggattacagcgatgtcatgctcaccagcgaggaagaaatcaaaaccactaaccctgtggctacagaggaatacggtatcgtggcagataacttgcagcagcaaaacacggctcctcaaattggaactgtcaacagccagggggccttacccggtatggtctggcagaaccgggacgtgtacctgcagggtcccatctgggccaagattcctcacacggacggcaacttccacccgtctccgctgatgggcggctttggcctgaaacatcctccgcctcagatcctgatcaagaacacgcctgtacctgcggatcctccgaccaccttcaaccagtcaaagctgaactctttcatcacgcaatacagcaccggacaggtcagcgtggaaattgaatgggagctgcagaaggaaaacagcaagcgctggaaccccgagatccagtacacctccaactactacaaatctacaagtgtggactttgctgttaatacagaaggcgtgtactctgaaccccgccccattggcacccgttacctcacccgtaatctgtaa

SEQ ID NO: 4002 - DNA, 2217 bp, synthetic construct
  misc_feature 1..2217: note = source = /note="Description of Artificial Sequence: Synthetic polynucleotide"
  source 1..2217: mol_type = other DNA
atggctgccgatggttatcttccagattggctcgaggacaacctctctgagggcattcgcgagtggtgggcgctgaaacctggagccccgaagcccaaagccaaccagcaaaagcaggacgacggccggggtctggtgcttcctggctacaagtacctcggacccttcaacggactcgacaagggggagcccgtcaacgcggcggacgcagcggccctcgagcacgacaaggcctacgaccagcagctgcaggcgggtgacaatccgtacctgcggtataaccacgccgacgccgagtttcaggagcgtctgcaagaagatacgtcttttgggggcaacctcgggcgagcagtcttccaggccaagaagcgggttctcgaacctctcggtctggttgaggaaggcgctaagacggctcctggaaagaagagaccggtagagccatcaccccagcgttctccagactcctctacgggcatcggcaagaaaggccaacagcccgccagaaaaagactcaattttggtcagactggcgactcagagtcagttccagaccctcaacctctcggagaacctccagcagcgccctctggtgtgggacctaatacaatggctgcaggcggtggcgcaccaatggcagacaataacgagggcgccgacggagtgggtagttcctcgggaaattggcattgcgattccacatggctgggcgacagagtcatcaccaccagcacccgaacctgggccctgcccacctacaacaaccacctctacaagcaaatctccaacgggacatcgggaggagccaccaacgacaacacctacttcggctacagcaccccctgggggtattttgactttaacagattccactgccacttttcaccacgtgactggcagcgactcatcaacaacaactggggattccggcccaagagactcagcttcaagctcttcaacatccaggtcaaggaggtcacgcagaatgaaggcaccaagaccatcgccaataacctcaccagcaccatccaggtgtttacggactcggagtaccagctgccgtacgttctcggctctgcccaccagggctgcctgcctccgttcccggcggacgtgttcatgattccccagtacggctacctgacactcaacaacggtagtcaggccgtgggacgctcctccttctactgcctggaatactttccttcgcagatgctgagaaccggcaacaacttccagtttacttacaccttcgaggacgtgcctttccacagcagctacgcccacagccagagcttggaccggctgatgaatcctctgattgaccagtacctgtactacttgtctcggactcaaacaacaggaggcacggcaaatacgcagactctgggcttcagccaaggtgggcctaatacaatggccaatcaggcaaagaactggctgccaggaccctgttaccgccaacaacgcgtctcaacgacaaccgggcaaaacaacaatagcaactttgcctggactgctgggaccaaataccatctgaatggaagaaattcattggctaatcctggcatcgctatggcaacacacaaagacgacgaggagcgtttttttcccagtaacgggatcctgatttttggcaaacaaaatgctgccagagacaatgcggattacagcgatgtcatgctcaccagcgaggaagaaatcaaaaccactaaccctgtggctacagaggaatacggtatcgtggcagataacttgcagcagcaaaacgcggctcctcaaattggaactgtcaacagccagggggccttacccggtatggtctggcagaaccgggacgtgtacctgcagggtcccatctgggccaagattcctcacacggacggcaacttccacccgtctccgctgatgggcggctttggcctgaaacatcctccgcctcagatcctgatcaagaacacgcctgtacctgcggatcccccgaccaccttcaaccagtcaaagctgaactctttcatcacgcaatacagcaccggacaggtcagcgtggaaattgaatgggagctgcagaaggaaaacagcaagcgctggaaccccgagatccagtacacctccaactactacaaatctacaagtgtggactttgctgttaatacagaaggcgtgtactctgaaccccgccccattggcacccgttacctcacccgtaatctgtaa

SEQ ID NO: 4003 - DNA, 2217 bp, synthetic construct
  misc_feature 1..2217: note = source = /note="Description of Artificial Sequence: Synthetic polynucleotide"
  source 1..2217: mol_type = other DNA
atggctgccgatggttatcttccagattggctcgaggacaacctctctgagggcattcgcgagtggtgggcgctgaaacctggagccccgaagcccaaagccaaccagcaaaagcaggacgacggccggggtctggtgcttcctggctacaagtacctcggacccttcaacggactcgacaagggggagcccgtcaacgcggcggacgcagcggccctcgagcacgacaaggcctacgaccagcagctgcaggcgggtgacaatccgtacctgcggtataaccacgccgacgccgagtttcaggagcgtctgcaagaagatacgtcttttgggggcaacctcgggcgagcagtcttccaggccaagaagcgggttctcgaacctctcggtctggttgaggaaggcgctaagacggctcctggaaagaagagaccggtagagccatcaccccagcgttctccagactcctctacgggcatcggcaagaaaggccaacagcccgccagaaaaagactcaattttggtcagactggcgactcagagtcagttccagaccctcaacctctcggagaacctccagcagcgccctctggtgtgggacctaatacaatggctgcaggcggtggcgcaccaatggcagacaataacgaaggcgccgacggagtgggtagttcctcgggaaattggcattgcgattccacatggctgggcgacagagtcatcaccaccagcacccgaacctgggccctgcccacctacaacaaccacctctacaagcaaatctccaacgggacatcgggaggagccaccaacgacaacacctacttcggctacagcaccccctgggggtattttgactttaacagattccactgccacttttcaccacgtgactggcagcgactcatcaacaacaactggggattccggcccaagagactcagcttcaagctcttcaacatccaggtcaaggaggtcacgcagaatgaaggcaccaagaccatcgccaataacctcaccagcaccatccaggtgtttacggactcggagtaccagctgccgtacgttctcggctctgcccaccagggctgcctgcctccgttcccggcggacgtgttcacgattccccagtacggctacctaacactcaacaacggtagtcaggccgtgggacgctcctccttctactgcctggaatactttccttcgcagatgctgagaaccggcaacaacttccagtttacttacaccttcgaggacgtgcctttccacagcagctacgcccacagccagagcttggaccggctgatgaatcctctgattgaccagtacctgtactacttgtctcggactcaaacaacaggaggcacggcaaatacgcagactctgggcttcagccaaggtgggcctaatacaatggccaatcaggcaaagaactggctgccaggaccctgttaccgccaacaacgcgtctcaacgacaaccgggcgaaacaacaatagcaactttgcctggactgctgggaccaaataccatctgaatggaagaaattcattggctaatcctggcatcgctatggcaacacacaaagacgacgaggagcgtttttttcccagtaacgggatcctgatttttggcaaacaaaatgctgccagagacaatgcggattacagcgatgtcatgctcaccagcgaggaagaaatcaaaaccactaaccctgtggctacagaggaatacggtatcgtggcagataacttgcagcagcaaaacacggctcctcaaattggaactgtcaacagccagggggccttacccggtatggtctggcagaaccgggacgtgtacctgcagggtcccatctgggccaagattcctcacacggacggcaacttccacccgtctccgctgatgggcggctttggcctgaaacatcctccgcctcagatcctgatcaagaacacgcctgtacctgcggatcctccgaccaccttcaaccagtcaaagctgaactctttcatcacgcaatacagcaccggacaggtcagcgtggaaattgaatgggagctgcagaaggaaaacagcaagcgctggaaccccgagatccagtacacctccaactactacaaatctacaagtgtggactttgctgttaatacagaaggcgtgtactctgaaccccgccccattggcacccgttacctcacccgtaatctgtaa

SEQ ID NO: 4004 - DNA, 2217 bp, synthetic construct
  misc_feature 1..2217: note = source = /note="Description of Artificial Sequence: Synthetic polynucleotide"
  source 1..2217: mol_type = other DNA
atggctgccgatggttatcttccagattggctcgaggacaacctctctgagggcattcgcgagtggtgggcgctgaaacctggagccccgaagcccaaagccaaccagcaaaagcaggacgacggccggggtctggtgcttcctggctacaagtacctcggacccttcaacggactcgacaagggggagcccgtcaacgcggcggacgcagcggccctcgagcacgacaaggcctacgaccagcagctgcaggcgggtgacaatccgtacctgcggtataaccacgccgacgccgagtttcaggagcgtctgcaagaagatacgtcttttgggggcaacctcgggcgagcggtcttccaggccaagaagcgggttctcgaacctctcggtctggttgaggaaggcgctaagacggctcctggaaagaagagaccggtagagccatcaccccagcgttctccagactcctctacgggcatcggcaagaaaggccaacagcccgccagaaaaagactcaattttggtcagactggcgactcagagtcagttccagaccctcaacctctcggagaacctccagcagcgccctctggtgtgggacctaatacaatggctgcaggcggtggcgcaccaatggcagacaataacgaaggcgccgacggagtgggtagttcctcgggaaattggcattgcgattccacatggctgggcgacagagtcatcaccaccagcacccgaacctgggccctgcccacctacaacaaccacctctacaagcaaatctccaacgggacatcggggggagccaccaacgacaacacctacttcggctacagcaccccctgggggtattttgactttaacagattccactgccacttttcaccacgtgactggcagcgactcatcaacaacaactggggattccggcccaagagactcagcttcaagctcttcaacatccaggtcaaggaggtcacgcagaatgaaggcaccaagaccatcgccaataacctcaccagcaccatccaggtgtttacggactcggagtaccagctgccgtacgttctcggctctgcccaccagggctgcctgcctccgttcccggcggacgtgttcacgattccccagtacggctacctaacactcaacaacggtagtcaggccgtgggacgctcctccttctactgcctggaatactttccttcgcagatgctgagaaccggcaacaacttccagtttacttacaccttcgaggacgtgcctttccacagcagctacgcccacagccagagcttggaccggctgatgaatcctctgattgaccagtacctgtactacttgtctcggactcaaacaacaggaggcacggcaaatacgcagactctgggcttcagccaaggtgggcctaatacaatggccaatcaggcaaagaactggctgccaggaccctgttaccgccaacaacgcgtctcaacgacaaccgggcaaaacaacaatagcaactttgcctggactgctgggaccaaataccatctgaatggaagaaattcattggctaatcctggcatcgctatggcaacacacaaagacgacgaggagcgtttttttcccagtaacgggatcctgatttttggcaaacaaaatgctgccagagacaatgcggattacagcgatgtcgtgctcaccagcgaggaagaaatcaaaaccactaaccctgtggctacagaggaatacggtatcgtggcagataacttgcagcagcaaaacacggctcctcaaattggaactgtcaacagccagggggccttacccggtatggtctggcagaaccgggacgtgtacctgcagggtcccatctgggccaagattcctcacacggacggcaacttccacccgtctccgctgatgggcggctttggcctgaaacatcctccgcctcagatcctgatcaagaacacgcctgtacctgcggatcctccgaccaccttcaaccagtcaaagctgaactctttcatcacgcaatacagcaccggacaggtcagcgtggaaattgaatgggagctgcagaaggaaaacagcaagcgctggaaccccgagatccagtacacctccaactactacaaatctacaagtgtggactttgctgttaatacagaaggcgtgtactctgaaccccgccccattggcacccgttacctcacccgtaatctgtaa

SEQ ID NO: 4005 - DNA, 2217 bp, synthetic construct
  misc_feature 1..2217: note = source = /note="Description of Artificial Sequence: Synthetic polynucleotide"
  source 1..2217: mol_type = other DNA
atggctgccgatggttatcttccagattggctcgaggacaacctctctgagggcattcgcgagtggtgggcactgaaacctggagccccgaagcccaaagccaaccagcaaaagcaggacgacggccggggtctggtgcttcctggctacaagtacctcggacccttcaacggactcgacaagggggagcccgtcaacgcggcggacgcagcggccctcgagcacgacaaggcctacgaccagcagctgcaggcgggtgacaatccgtacctgcggtataaccacgccgacgccgagtttcaggagcgtctgcaagaagatacgtcttttgggggcaacctcgggcgagcagtcttccaggccaagaagcgggttctcgaacctctcggtctggttgaggaaggcgctaagacggctcctggaaagaagagaccggtagagccatcaccccagcgttctccagactcctctacgggcatcggcaagaaaggccaacagcccgccagaaaaagactcaattttggtcagactggcgactcagagtcagttccagaccctcaacctctcggagaacctccagcagcgccctctggtgtgggacctaatacaatggctgcaggcggtggcgcaccaatggcagacaataacgaaggcgccgacggagtgggtagttcctcgggaaattggcattgcgattccacatggctgggcgacagagtcatcaccaccagcacccgaacctgggccctgcccacctacaacaaccacctctacaagcaaatctccaacgggacatcgggaggagccaccaacgacaacacctacttcggctacagcaccccctgggggtattttgactttaacagattccactgccacttttcaccacgtgactggcagcgactcatcaacaacaactggggattccggcccaagagactcagcttcaagctcttcaacatccaggtcaaggaggtcacgcagaatgaaggcaccaagaccatcgccaataacctcaccagcaccatccaggtgtttacggactcggagtaccagctgccgtacgttctcggctctgcccaccagggctgcctgcctccgttcccggcggacgtgttcatgattccccagtacggctacctaacactcaacaacggtagtcaggccgtgggacgctcctccttctactgcctggaatactttccttcgcagatgctgagagccggcaacaacttccagtttacttacaccttcgaggacgtgcctttccacagcagctacgcccacagccagagcttggaccggctgatgaatcctctgattgaccagtacctgtactacttgtctcggactcaaacaacaggaggcacggcaaatacgcagactctgggcttcagccaaggtgggcctaatacaatggccaatcaggcaaagaactggctgccaggaccctgttaccgccaacaacgcgtctcaacgacaaccgggcaaaacaacaatagcaactttgcctggactgctgggaccaaataccatctgaatggaagaaattcattggctaatcctggcatcgctatggcaacacacaaagacgacgaggagcgtttttttcccagtaacgggatcctgatttttggcaaacaaaatgctgccagagacaatgcggattacagcgatgtcatgctcaccagcgaggaagaaatcaaaaccactaaccctgtggctacagaggaatacggtatcgtggcagataacttgcagcagcaaaacacggctcctcaaattggaactgtcgacagccagggggccttacccggtatggtctggcagaaccgggacgtgtacctgcagggtcccatctgggccaagattcctcacacggacggcaacttccacccgtctccgctgatgggcggctttggcctgaaacatcctccgcctcagatcctgatcaagaacacgcctgtacctgcggatcctccgaccaccttcaaccagtcaaagctgaactctttcatcacgcaatacagcaccggacaggtcagcgtggaagttgaatgggagctgcagaaggaaaacagcaagcgctggaaccccgagatccagtacacctccaactactacaaatctacaagtgtggactttgctgttaatacagaaggcgtgtactctgaaccccgccccattggcacccgttacctcacccgtaatctgtaa

SEQ ID NO: 4006 - DNA, 2217 bp, synthetic construct
  misc_feature 1..2217: note = source = /note="Description of Artificial Sequence: Synthetic polynucleotide"
  source 1..2217: mol_type = other DNA
atggctgccgatggttatcttccagattggctcgaggacaacctctctgagggcattcgcgagtggtgggcgctgaaacctggagccccgaagcccaaagccaaccagcaaaagcaggacgacggccggggtctggtgcttcctggctacaagtacctcggacccttcaacggactcgacaagggggagcccgtcaacgcggcggacgcagcggccctcgagcacgacaaggcctacgaccagcagctgcaggcgggtgacaatccgtacctgcggtataaccacgccgacgccgagtttcaggagcgtctgcaagaagatacgtcttttgggggcagcctcgggcgagcagtcttccaggccaagaagcgggttctcgaacctctcggtctggttgaggaaggcgctaagacggctcctggaaagaagagaccggtagagccatcaccccagcgttctccagactcctctacgggcatcggcaagaaaggccaacagcccgccagaaaaagactcaattttggtcagactggcgactcagagtcagttccagaccctcaacctctcggagaacctccagcagcgccctctggtgtgggacctaatacaatggctgcaggcggtggcgcaccaatggcagacaataacgaaggcgccgacggagtgggtagttcctcgggaaattggcattgcgattccacatggctgggcgacagagtcatcaccaccagcacccgaacctgggccctgcccacctacaacaaccacctctacaagcaaatctccaacgggacatcgggaggagccaccaacgacaacacctacttcggctacagcaccccctgggggtattttgactttaacagattccactgccacttttcaccacgtgactggcagcgactcatcaacaacaactggggattccggcccaagagactcagcttcaagctcttcaacatccaggtcaaggaggtcacgcagaatgaaggcaccaagaccatcgccaataacctcaccagcaccatccaggtgtttacggactcggagtaccagctgccgtacgttctcggctctgcccaccagggctgcctgcctccgttcccggcggacgtgttcatgattccccagtacggctacctaacactcaacaacggtagtcaggccgtgggacgctcctccttctactgcctggaatactttccttcgcagatgctgagaaccggcaacaacttccagtttacttacaccttcgaggacgtgcctttccacagcagctacgcccacagccagagcttggaccggctgatgaatcctctgattgaccagtacctgtactacttgtctcggactcaaacaacaggaggcacggcaaatacgcagactctgggcttcagccaaggtgggcctaatacaatggccaatcaggcaaagaactggctgccaggaccctgttaccgccaacaacgcgtctcaacgacaaccgggcaaaacaacaatagcaactttgcctggactgctgggaccaaataccatctgaatggaagaaattcattggctaatcctggcatcgctatggcaacacacaaagacgacgaggagcgtttttttcccagtaacgggatcctgatttttggcaaacaaaatgctgccagagacaatgcggattacagcgatgtcatgctcaccagcgaggaagaaatcaaaaccactaaccctgtggctacagaggaatacggtatcgtggcagataacttgcagcagcaaaacacggctcctcaaattggaactgtcaacagccagggggccttacccggtatggtctggcagaaccgggacgtgtacctgcagggtcccatctgggccaagattcctcacacggacggcaacttccacccgtctccgctgatgggcggctttggcctgaaacatcctccgcctcagatcctgatcaagaacacgcctgtacctgcggatcctccgaccaccttcaaccagtcaaagctgaactctttcatcacgcaatacagcaccggacaggtcagcgtggaaattgaatgggagctgcagaaggaaaacagcaagcgctggaaccccgagatccagtacacctccaactactacaaatctacaagtgtggactttgctgttaatacagaaggcgtgtactctgaaccccgccccattggcacccgtcacctcacccgtaatctgtaa

SEQ ID NO: 4007 - DNA, 2217 bp, synthetic construct
  misc_feature 1..2217: note = source = /note="Description of Artificial Sequence: Synthetic polynucleotide"
  source 1..2217: mol_type = other DNA
atggctgccgatggttatcttccagattggctcgaggacaacctctctgagggcattcgcgagtggtgggcgctgaaacctggagccccgaagcccaaagccaaccagcaaaagcaggacgacggccggggtctggtgcttcctggctacaagtacctcggacccttcaacggactcgacaagggggagcccgtcaacgcggcggacgcagcggccctcgagcacgacaaggcctacgaccagcagctgcaggcgggtgacaatccgtacctgcggtataaccacgccgacgccgagtttcaggagcgtctgcaagaagatacgtcttttgggggcaacctcgggcgagcagtcttccaggccaagaagcgggttctcgaacctctcggtctggttgaggaaggcgctaagacggctcctggaaagaagagaccggtagagccatcaccccagcgttctccagactcctctacgggcatcggcaagaaaggccaacagcccgccagaaaaagactcaattttggtcagactggcgactcagagtcagttccagaccctcaacctctcggagaacctccagcagcgccctctggtgtgggacctaatacaatggctgcaggcggtggcgcaccaatggcagacaataacgaaggcgccgacggagtgggtagttcctcgggaaattggcattgcgattccacatggctgggcgacagagtcatcaccaccagcacccgaacctgggccctgcccacctacaacaaccacctctacaagcaaatctccaacgggacatcgggaggagccaccaacgacaacacctacttcggctacagcaccccctgggggtattttgactttaacagattccactgccacttttcaccacgtgactggcagcgactcatcaacaacaactggggattccggcccaagagactcagcttcaagctcttcaacatccaggtcaaggaggtcacgcagaatgaaggcaccaagaccatcgccaataacctcaccagcaccatccaggtgtttacggactcggagtaccagctgccgtacgttctcggctctgcccaccagggctgcctgcctccgttcccggcggacgtgttcacgattccccagtacggctacctaacactcaacaacggtagtcaggccgtgggacgctcctccttctactgcctggaatactttccttcgcagatgctgagaaccggcaacaacttccagtttacttacaccttcgaggacgtgcctttccacagcagctacgcccacagccagagcttggaccggctgatgaatcctctgattgaccagtacctgtactacttgtctcggactcaaacaacaggaggcacggcaaatacgcagactctgggcttcagccaaggtgggcctaatacaatggccaatcaggcaaagaactggctgccaggaccctgttaccgccaacaacgcgtctcaacgacaaccgggcaaaacaacaatagcaactttgcctggactgctgggaccaaataccatctgaatggaagaaattcattggctaatcctggcatcgctatggtaacacacaaagacgacgaggagcgtttttttcccagtaacgggatcctgatttttggcaaacaaaatgctgccagagacaatgcggattacagcgatgtcatgctcaccagcgaggaagaaatcaaaaccactaaccctgtggctacagaggaatacggtatcgtggcagataacttgcagcagcaaaacacggctcctcaaattggaactgtcaacagccagggggccttacccggtatggtctggcagaaccgggacgtgtacctgcagggtcccatctgggccaagattcctcacacggacggcaacttccacccgtctccgctgatgggcggctttggcctgaaacatcctccgcctcagatcctgatcaagaacacgcctgtacctgcggatcctccgaccaccttcaaccagtcaaagctgaactctttcatcacgcaatacagcaccggacaggtcagcgtggaaattgaatgggagctgcagaaggaaaacagcaagcgctggaaccccgagatccagtacacctccaactactacaaatctacaagtgtggactttgctgttaatacagaaggcgtgtactctgaaccccgccccattggcacccgttacctcacccgtaatctgtaa

SEQ ID NO: 4008 - protein, 734 aa, synthetic construct
  REGION 1..734: note = source = /note="Description of Artificial Sequence: Synthetic polypeptide"
MAADGYLPDWLEDTLSEGIRQWWKLKPGPPPPKPAERHKDDSRGLVLPGYKYLGPFNGLDKGEPVNEADAAALEHDKAYDRQLDSGDNPYLKYNHADAEFQERLKEDTSFGGNLGRAVFQAKKRVLEPLGLVEEPVKTAPGKKRPVEHSPVEPDSSSGTGKAGQQPARKRLNFGQTGDADSVPDPQPLGQPPAAPSGLGTNTMATGSGAPMADNNEGADGVGNSSGNWHCDSTWMGDRVITTSTRTWALPTYNNHLYKQISSQSGASNDNHYFGYSTPWGYFDFNRFHCHFSPRDWQRLINNNWGFRPKRLNFKLFNIQVKEVTQNDGTTTIANNLTSTVQVFTDSEYQLPYVLGSAHQGCLPPFPADVFMVPQYGYLTLNNGSQAVGRSSFYCLEYFPSQMLRTGNNFTFSYTFEDVPFHSSYAHSQSLDRLMNPLIDQYLYYLSRTHSNSGTHQQSRLQFSQAGASMSGPARNWLPGPCYRQQRVSKQSADNNNSEYSWTGATKYHLNGRDSLVNPGPAMASHKDDEEKFFLMSGVLIFGKQGSDENNVDIEKVMITDEEEIRTTNPVATEQYGSVSTNLQEAKTSPATADVNHQGVLPGMVWQDRDVYLQGPIWAKIPHTDGHFHPSPLMGGFGLKHPPPQILIKNTPVPANPSTTFSAAKFASFITQYSTGQASVEIEWELQKENSKRWNPEIQYTSNYNKSVNVDFTVDTNGVYSEPRPIGTRYLTRNL

SEQ ID NO: 4009 - protein, 734 aa, synthetic construct
  REGION 1..734: note = source = /note="Description of Artificial Sequence: Synthetic polypeptide"
MAADGYLPDWLEDTLSEGIRQWWKLKPGPPPPKPAERHKDDSRGLVLPGYKYLGPFNGLDKGEPVNEADAAALEHDKAYDRQLDSGDNPYLKYNHADAEFQERLKEDTSFGGNLGRAVFQAKKRVLEPLGLVEEPVKTAPGKKRPVEHSPVEPDSSSGTGKAGQQPARKRLNFGQTGDADSVPDPQPLGQPPAAPTSLGSTTMATGSGAPMADNNEGADGVGNSSGNWHCDSQWLGDRVITTSTRTWALPTYNNHLYKQISSQSGASNDNHYFGHSTPWGYFDFNRFHCHFSPRDWQRLINNNWGFRPKRLNFKLFNIQVKEVTQNDGTTTIANNLTSTVQVFTDSEYQLPYVLGSAHQGCLPPFPADVFMVPQYGYLTLNNGSQAVGRSSFYCLEYFPSQMLRTGNNFTFSYTFEDVPFHSSYAHSQSLDRLMNPLIDQYLYYLSRTHSNSGTHQQSRLQFSQAGASMSGPARNWLPGPCYRQQRVSKQSADNNNSEYSWTGATKYRLNGRDSLVNPGSAMASHKDDEEKFFLMSGVLIFGKQGSDENNVDIEKVMITDEEEIRTTNPVATEQYGSVSTNLQEAKTSPATADVNHQGVLPGMVWQDRDVYLQGPIWAKIPHTDGHFHPSPLMGGFGLKHPPPQILIKNTPVPANPSTTFSAAKFASFITQYSTGQVSVEIEWELQKENSKRWNPEIQYTSNYNKSVNVDFTVDTNGVYSEPRPIGTRYLTRNL

SEQ ID NO: 4010 - protein, 734 aa, synthetic construct
  REGION 1..734: note = source = /note="Description of Artificial Sequence: Synthetic polypeptide"
MAADGYLPDWLEDTLSEGIRQWWKLKPGPPPPKPAERHKDDSRGLVLPGYKYLGPFNGLDKGEPVNEADAAALEHDKAYDRQLDSGDNPYLKYNHADAEFQERLKEDTSFGGNLGRAVFQAKKRVLEPLGLVEEPVKTAPGKKRPVEHSPVEPDSSSGTGKAGQQPARKRLNFGQTGDADSVPDPQPLGQPPAAPSGLGTNTMATGSGAPMADNNEGADGVGNSSGNWHCDSTWMGDRVITTSTRTWALPTYNNHLYKQISSQSGASNDNHYFGYSTPWGYFDFNRFHCHFSPRDWQRLINNNWGFRPKRLNFKLFNIQVKEVTQNDGTTTIANNLTSTVQVFTDSEYQLPYVLGSAHQGCLPPFPADVFMVPQYGYLTLNNGSQAVGRSSFYCLEYFPSQMLRTGNNFTFSYTFEDVPFHSSYAHSQSLDRLMNPLIDQYLYYLSRTHSNSGTHQQSRLQFSQAGASMSGPARNWLPGPCYRQQRVSKQSADNNNSEYSWTGATKYRLNGRDSLVNPGSAMASHKDDEEKFFLMSGVLIFGKQGSDENNVDIEKVMITDEEEIRTTNPVATEQYGSVSTNLQEAKTSPATADVNHQGVLPGMVWQDRDVYLQGPIWAKIPHTDGHFHPSPLMGGFGLKHPPPQILIKNTPVPANPSTTFSAAKFASFITQYSTGQVSVEIEWELQKENSKRWNPEIQYTSNYNKSVNVDFTVDTNGVYSEPRPIGTRYLTRNL

SEQ ID NO: 4011 - protein, 734 aa, synthetic construct
  REGION 1..734: note = source = /note="Description of Artificial Sequence: Synthetic polypeptide"
MAADGYLPDWLEDTLSEGIRQWWKLKPGPPPPKPAERHKDDSRGLVLPGYKYLGPFNGLDKGEPVNEADAAALEHDKAYDRQLDSGDNPYLKYNHADAEFQERLKEDTSFGGNLGRAVFQAKKRVLEPLGLVEEPVKTAPGKKRPVEHSPVEPDSSSGTGKAGQQPARKRLNFGQTGDADSVPDPQPLGQPPAAPTSLGSTTMATGSGAPMADNNEGADGVGNSSGNWHCDSQWLGDRVITTSTRTWALPTYNNHLYKQISSQSGASNDNHYFGHSTPWGYFDFNRFHCHFSPRDWQRLINNNWGFRPKRLNFKLFNIQVKEVTQNDGTTTIANNLTSTVQVFTDSEYQLPYVLGSAHQGCLPPFPADVFMVPQYGYLTLNNGSQAVGRSSFYCLEYFPSQMLRTGNNFTFSYTFEDVPFHSSYAHSQSLDRLMNPLIDQYLYYLSRTHSNSGTHQQSRLQFSQAGASMSGPARNWLPGPCYRQQRVSKQSADNNNSEYSWTGATKYHLNGRDSLVNPGPAMASHKDDEEKFFLMSGVLIFGKQGSDENNVDIEKVMITDEEEIRTTNPVATEQYGSVSTNLQEAKTSPATADVNHQGVLPGMVWQDRDVYLQGPIWAKIPHTDGHFHPSPLMGGFGLKHPPPQILIKNTPVPANPSTTFSAAKFASFITQYSTGQASVEIEWELQKENSKRWNPEIQYTSNYNKSVNVDFTVDTNGVYSEPRPIGTRYLTRNL

SEQ ID NO: 4012 - protein, 734 aa, synthetic construct
  REGION 1..734: note = source = /note="Description of Artificial Sequence: Synthetic polypeptide"
MAADGYLPDWLEDTLSEGIRQWWKLKPGPPPPKPAERHKDDSRGLVLPGYKYLGPFNGLDKGEPVNEADAAALEHDKAYDRQLDSGDNPYLKYNHADAEFQERLKEDTSFGGNLGRAVFQAKKRVLEPLGLVEEPVKTAPGKKRPVEHSPVEPDSSSGTGKAGQQPARKRLNFGQTGDADSVPDPQPLGQPPAAPTSLGSTTMATGSGAPMADNNEGADGVGNSSGNWHCDSQWLGDRVITTSTRTWALPTYNNHLYKQISSQSGASNDNHYFGYSTPWGYFDFNRFHCHFSPRDWQRLINNNWGFRPKRLNFKLFNIQVKEVTQNDGTTTIANNLTSTVQVFTDSEYQLPYVLGSAHQGCLPPFPADVFMVPQYGYLTLNNGSQAVGRSSFYCLEYFPSQMLRTGNNFTFSYTFEDVPFHSSYAHSQSLDRLMNPLIDQYLYYLSRTHSNSGTHQQSRLQFSQAGASMSGPARNWLPGPCYRQQRVSKQSADNNNSEYSWTGATKYRLNGRDSLVNPGSAMASHKDDEEKFFLMSGVLIFGKQGSDENNVDIEKVMITDEEEIRTTNPVATEQYGSVSTNLQEAKTSPATADVNHQGVLPGMVWQDRDVYLQGPIWAKIPHTDGHFHPSPLMGGFGLKHPPPQILIKNTPVPANPSTTFSAAKFASFITQYSTGQVSVEIEWELQKENSKRWNPEIQYTSNYNKSVNVDFTVDTNGVYSEPRPIGTRYLTRNL

SEQ ID NO: 4013 - protein, 734 aa, synthetic construct
  REGION 1..734: note = source = /note="Description of Artificial Sequence: Synthetic polypeptide"
MAADGYLPDWLEDTLSEGIRQWWKLKPGPPPPKPAERHKDDSRGLVLPGYKYLGPFNGLDKGEPVNEADAAALEHDKAYDRQLDSGDNPYLKYNHADAEFQERLKEDTSFGGNLGRAVFQAKKRVLEPLGLVEEPVKTAPGKKRPVEHSPVEPDSSSGTGKAGQQPARKRLNFGQTGDADSVPDPQPLGQPPAAPSGLGTNTMATGSGAPMADNNEGADGVGNSSGNWHCDSTWMGDRVITTSTRTWALPTYNNHLYKQISSQSGASNDNHYFGYSTPWGYFDFNRFHCHFSPRDWQRLINNNWGFRPKRLNFKLFNIQVKEVTQNDGTTTIANNLTSTVQVFTDSEYQLPYVLGSAHQGCLPPFPADVFMVPQYGYLTLNNGSQAVGRSSFYCLEYFPSQMLRTGNNFTFSYTFEDVPFHSSYAHSQSLDRLMNPLIDQYLYYLSRTHSNSGTHQQSRLQFSQAGASMSGPARNWLPGPCYRQQRVSKQSADNNNSEYSWTGATKYRLNGRDSLVNPGSAMASHKDDEEKFFLMSGVLIFGKQGSDENNVDIEKVMITDEEEIRTTNPVATEQYGSVSTNLQEAKTSPATADVNHQGVLPGMVWQDRDVYLQGPIWAKIPHTDGHFHPSPLMGGFGLKHPPPQILIKNTPVPANPSTTFSAAKFASFITQYSTGQASVEIEWELQKENSKRWNPEIQYTSNYNKSVNVDFTVDTNGVYSEPRPIGTRYLTRNL

SEQ ID NO: 4014 - protein, 734 aa, synthetic construct
  REGION 1..734: note = source = /note="Description of Artificial Sequence: Synthetic polypeptide"
MAADGYLPDWLEDTLSEGIRQWWKLKPGPPPPKPAERHKDDSRGLVLPGYKYLGPFNGLDKGEPVNEADAAALEHDKAYDRQLDSGDNPYLKYNHADAEFQERLKEDTSFGGNLGRAVFQAKKRVLEPLGLVEEPVKTAPGKKRPVEHSPVEPDSSSGTGKAGQQPARKRLNFGQTGDADSVPDPQPLGQPPAAPTSLGSTTMATGSGAPMADNNEGADGVGNSSGNWHCDSTWMGDRVITTSTRTWALPTYNNHLYKQISSQSGASNDNHYFGYSTPWGYFDFNRFHCHFSPRDWQRLINNNWGFRPKRLNFKLFNIQVKEVTQNDGTTTIANNLTSTVQVFTDSEYQLPYVLGSAHQGCLPPFPADVFMVPQYGYLTLNNGSQAVGRSSFYCLEYFPSQMLRTGNNFTFSYTFEDVPFHSSYAHSQSLDRLMNPLIDQYLYYLSRTHSNSGTHQQSRLQFSQAGASMSGPARNWLPGPCYRQQRVSKQSADNNNSEYSWTGATKYRLNGRDSLVNPGSAMASHKDDEEKFFLMSGVLIFGKQGSDENNVDIEKVMITDEEEIRTTNPVATEQYGSVSTNLQEAKTSPATADVNHQGVLPGMVWQDRDVYLQGPIWAKIPHTDGHFHPSPLMGGFGLKHPPPQILIKNTPVPANPSTTFSAAKFASFITQYSTGQVSVEIEWELQKENSKRWNPEIQYTSNYNKSVNVDFTVDTNGVYSEPRPIGTRYLTRNL

SEQ ID NO: 4015 - protein, 734 aa, synthetic construct
  REGION 1..734: note = source = /note="Description of Artificial Sequence: Synthetic polypeptide"
MAADGYLPDWLEDTLSEGIRQWWKLKPGPPPPKPAERHKDDSRGLVLPGYKYLGPFNGLDKGEPVNEADAAALEHDKAYDRQLDSGDNPYLKYNHADAEFQERLKEDTSFGGNLGRAVFQAKKRVLEPLGLVEEPVKTAPGKKRPVEHSPVEPDSSSGTGKAGQQPARKRLNFGQTGDADSVPDPQPLGQPPAAPSGLGTNTMATGSGAPMADNNEGADGVGNSSGNWHCDSTWMGDRVITTSTRTWALPTYNNHLYKQISSQSGASNDNHYFGYSTPWGYFDFNRFHCHFSPRDWQRLINNNWGFRPKRLNFKLFNIQVKEVTQNGGTTTIANNLTSTVQVFTDSEYQLPYVLGSAHQGCLPPFPADVFMVPQYGYLTLNNGSQAVGRSSFYCLEYFPSQMLRTGNNFTFSYTFEDVPFHSSYAHSQSLDRLMNPLIDQYLYYLSRTHSNSGTHQQSRLQFSQAGASMSGPARNWLPGPCYRQQRVSKQSADNNNSEYSWTGATKYRLNGRDSLVNPGSAMASHKDDEEKFFLMSGVLIFGKQGSDENNVDIEKVMITDEEEIRTTNPVATEQYGSVSTNLQEAKTSPATADVNHQGVLPGMVWQDRDVYLQGPIWAKIPHTDGHFHPSPLMGGFGLKHPPPQILIKNTPVPANPSTTFSAAKFASFITQYSTGQVSVEIEWELQKENSKRWNPEIQYTSNYNKSVNVDFTVDTNGVYSEPRPIGTRYLTRNL

SEQ ID NO: 4016 - protein, 735 aa, synthetic construct
  REGION 1..735: note = source = /note="Description of Artificial Sequence: Synthetic polypeptide"
MAADGYLPDWLEDTLSEGIRQWWKLKPGPPPPKPAERHKDDSRGLVLPGYKYLGPFNGLDKGEPVNEADAAALEHDKAYDRQLDSGDNPYLKYNHADAEFQERLKEDTSFGGNLGRAVFQAKKRVLEPLGLVEEPVKTAPGKKRPVEHSPVEPDSSSGTGKAGQQPARKRLNFGQTGDADSVPDPQPLGQPPAAPSGLGTNTMATGSGAPMADNNEGADGVGNSSGNWHCDSTWMGDRVITTSTRTWALPTYNNHLYKQISSQSGASNDNHYFGYSTPWGYFDFNRFHCHFSPRDWQRLINNNWGFRPKRLNFKLFNIQVKEVTQNDGTTTIANNLTSTVQVFTDSEYQLPYVLGSAHQGCLPPFPADVFMVPQYGYLTLNNGSQAVGRSSFYCLEYFPSQMLRTGNNFTFSYTFEDVPFHSSYAHSQSLDRLMNPLIDQYLYYLSRTNTPSGTTTQSRLQFSQAGASDIRDQSRNWLPGPCYRQQRVSKTSADNNNSEYSWTGATKYHLNGRDSLVNPGPAMASHKDDEEKFFPQSGILIFGKQGSEKTNVDIEKVMITDEEEIRTTNPVATEQYGSVSTNLQRGNRQAATADVNTQGVLPGMVWQDRDVYLQGPIWAKIPHTDGHFHPSPLMGGFGLKHPPPQILIKNTPVPANPSTTFSAAKFASFITQYSTGQVSVEIEWELQKENSKRWNPEIQYTSNYNKSVNVDFTVDTNGVYSEPRPIGTRYLTRNL

SEQ ID NO: 4017 - protein, 735 aa, synthetic construct
  REGION 1..735: note = source = /note="Description of Artificial Sequence: Synthetic polypeptide"
MAADGYLPDWLEDTLSEGIRQWWKLKPGPPPPKPAERHKDDSRGLVLPGYKYLGPFNGLDKGEPVNEADAAALEHDKAYDRQLDSGDNPYLKYNHADAEFQERLKEDTSFGGNLGRAVFQAKKRVLEPLGLVEEPVKTAPGKKRPVEHSPVEPDSSSGTGKAGQQPARKRLNFGQTGDADSVPDPQPLGQPPAAPSGLGTNTMATGSGAPMADNNEGADGVGNSSGNWHCDSTWMGDRVITTSTRTWALPTYNNHLYKQISSQSGASNDNHYFGYSTPWGYFDFNRFHCHFSPRDWQRLINNNWGFRPKRLNFKLFNIQVKEVTQNDGTTTIANNLTSTVQVFTDSEYQLPYVLGSAHQGCLPPFPADVFMVPQYGYLTLNNGSQAVGRSSFYCLEYFPSQMLRTGNNFTFSYTFEDVPFHSSYARSQSLDRLMNPLIDQYLYYLSRTNTPSGTTTQSRLQFSQAGASDIRDQSRNWLPGPCYRQQRVSKTSADNNNSEYSWTGATKYHLNGRDSLVNPGPAMASHKDDEEKFFPQSGVLIFGKQGSEKTNVDIEKVMITDEEEIRTTNPVATEQYGSVSTNLQRGNRQAATADVNTQGVLPGMVWQDRDVYLQGPIWAKIPHTDGHFHPSPLMGGFGLKHPPPQILIKNTPVPANPSTTFSAAKFASFITQYSTGQVSVEIEWELQKENSKRWNPEIQYTSNYNKSVNVDFTVDTNGVYSEPRPIGTRYLTRNL

SEQ ID NO: 4018 - protein, 735 aa, synthetic construct
  REGION 1..735: note = source = /note="Description of Artificial Sequence: Synthetic polypeptide"
MAADGYLPDWLEDTLSEGIRQWWKLKPGPPPPKPAERHKDDSRGLVLPGYKYLGPFNGLDKGEPVNEADAAALEHDKAYDRQLDSGDNPYLKYNHADAEFQERLKEDTSFGGNLGRAVFQAKKRVLEPLGLVEEPVKTAPGKKRPVEHSPVEPDSSSGTGKAGQQPARKRLNFGQTGDADSVPDPQPLGQPPAAPSGLGTNTMATGSGAPMADNNEGADGVGNSSGNWHCDSTWMGDRVITTSTRTWALPTYNNHLYKQISSQSGASNDNHYFGYSTPWGYFDFNRFHCHFSPRDWQRLINNNWGFRPKRLNFKLFNIQVKEVTQNDGTTTIANNLTSTVQVFTDSEYQLPYVLGSAHQGCLPPFPADVFMVPQYGYLTLNNGSQAVGRSSFYCLEYFPSQMLRTGNNFTFSYTFEDVPFHSSYAHSQSLDRLMNPLIDQYLYYLSRTNTPSGTTTQSRLQFSQAGASDIRDQSRNWLPGPCYRQQRVSKTSADNNNSEYSWTGVTKYHLNGRDSLVNPGPAMASHKDDEEKFFPQSGVLIFGKQGSEKTNVDIEKVMITDEEEIRTTNPVATEQYGSVSTNLQRGNRQAATADVNTQGVLPGMVWQDRDVYLQGPIWAKIPHTDGHFHPSPLMGGFGLKHPPPQILIKNTPVPANPSTTFSAAKFASFITQYSTGQVSVEIEWELQKENSKRWNPEIQYTSNYNKSVNVDFTVDTNGVYSEPRPIGTRYLTRNL

SEQ ID NO: 4019 - protein, 735 aa, synthetic construct
  REGION 1..735: note = source = /note="Description of Artificial Sequence: Synthetic polypeptide"
MAADGYLPDWLEDTLSEGIRQWWKLKPGPPPPKPAERHKDDSRGLVLPGYKYLGPFNGLDKGEPVNEADAAALEHDKAYDRQLDSGDNPYPKYNHADAEFQERLKEDTSFGGNLGRAVFQAKKRVLEPLGLVEEPVKTAPGKKRPVEHSPVEPDSSSGTGKAGQQPARKRLNFGQTGDADSVPDPQPLGQPPAAPSGLGTNTMATGSGAPMADNNEGADGVGNSSGNWHCDSTWMGDRVITTSTRTWALPTYNNHLYKQISSQSGASNDNHYFGYSTPWGYFDFNRFHCHFSPRDWQRLINNNWGFRPKRLNFKLFNIQVKEVTQNDGTTTIANNLTSTVQVFTDSEYQLPYVLGSAHQGCLPPFPADVFMVPQYGYLTLNNGSQAVGRSSFYCLEYFPSQMLRTGNNFTFSYTFEDVPFHSSYAHSQSLDRLMNPLIDQYLYYLSRTNTPSGTTTQSRLQFSQAGASDIRDQSRNWLPGPCYRQQRVSKTSADNNNSEYSWTGATKYHLNGRDSLVNPGPAMASHKDDEEKFFPQSGVLIFGKQGSEKTNVDIEKVMITDEEEIRTTNPVATEQYGSVSTNLQRGNRQAATADVNTQGVLPGMVWQDRDVYLQGPIWAKIPHTDGHFHPSPLMGGFGLKHPPPQILIKNTPVPANPSTTFSAAKFASFITQYSTGQVSVEIEWELQKENSKRWNPEIQYTSNYNKSVNVDFTVDTNGVYSEPRPIGTRYLTRNL

SEQ ID NO: 4020 - protein, 735 aa, synthetic construct
  REGION 1..735: note = source = /note="Description of Artificial Sequence: Synthetic polypeptide"
MAADGYLPDWLEDTLSEGIRQWWKLKPGPPPPKPAERHKDDSRGLVLPGYKYLGPFNGLDKGEPVNEADAAALEHDKAYDRQLDSGDNPYLKYNHADAEFQERLKEDTSFGGNLGRAVFQAKKRVLEPLGLVEEPVKTAPGKKRPVEHSPVEPDSSSGTGKAGQQPARKRLNFGQTGDADSVPDPQPLGQPPAAPSGLGTNTMATGSGAPMADNNEGADGVGNSSGNWHCDSTWMGDRVITTSTRTWALPTYNNHLYKQISSQSGASNDNHYFGYSTPWGYFDFNRFHCHFSPRDWQRLINNNWGFRPKRLNFKLFNIQVKEVTQNDGTTTIANNLTSTVQVFTDSEYQLPYVLGSAHQGCLPPFPADVFMVPQYGYLTLNNGSQAVGRSSFYCLEYFPSQMLRTGNNFTFSYTFEDVPFHSSYAHSQSLDRLMNPLIDQYLYYLSRTNTPSGTTTQSRLQFSQAGASDIRDQSRNWLPGPCYRQQRVSKTSADNNNSEYSWTGATKYHLNGRDSLVNPGPAMASHKDDEEKFFPQSGVPIFGKQGSEKTNVDIEKVMITDEEEIRTTNPVATEQYGSVSTNLQRGNRQAATADVNTQGVLPGMVWQDRDVYLQGPIWAKIPHTDGHFHPSPLMGGFGLKHPPPQILIKNTPVPANPSTTFSAAKFASFITQYSTGQVSVEIEWELQKENSKRWNPEIQYTSNYNKSVNVDFTVDTNGVYSEPRPIGTRYLTRNL

SEQ ID NO: 4021 - protein, 735 aa, synthetic construct
  REGION 1..735: note = source = /note="Description of Artificial Sequence: Synthetic polypeptide"
MAADGYLPDWLEDTLSEGIRQWWKLKPGPPPPKPAERHKDDSRGLVLPGYKYLGPFNGLDKGEPVNEADAAALEHDKAYDRQLDSGDNPYLKYNHADAEFQERLKEDTSFGGNLGRAVFQAKKRVLEPLGLVEEPVKTAPGKKRPVEHSPVEPDSSSGTGKAGQQPARKRLNFGQTGDADSVPDPQPLGQPPAAPSGLGTNTMATGSGAPMADNNEGADGVGNSSGNWHCDSTWMGDRVITTSTRTWALPTYNNHLYKQISSQSGASNDNHYFGYSTPWGYFDFNRFHCHFSPRDWQRLINNNWGFRPRRLNFKLFNIQVKEVTQNDGTTTIANNLTSTVQVFTDSEYQLPYVLGSAHQGCLPPFPADVFMVPQYGYLTLNNGSQAVGRSSFYCLEYFPSQMLRTGNNFTFSYTFEDVPFHSSYAHSQSLDRLMNPLIDQYLYYLSRTNTPSGTTTQSRLQFSQAGASDIRDQSRNWLPGPCYRQQRVSKTSADNNNSEYSWTGATKYHLNGRDSLVNPGPAMASHKDDEEKFFPQSGVLIFGKQGSEKTNVDIEKVMITDEEEIRTTNPVATEQYGSVSTNLQRGNRQAATADVNTQGVLPGMVWQDRDVYLQGPIWAKIPHTDGHFHPSPLMGGFGLKHPPPQILIKNTPVPANPSTTFSAAKFASFITQYSTGQVSVEIEWELQKENSKRWNPEIQYTSNYNKSVNVDFTVDTNGVYSEPRPIGTRYLTRNL

SEQ ID NO: 4022 - protein, 735 aa, synthetic construct
  REGION 1..735: note = source = /note="Description of Artificial Sequence: Synthetic polypeptide"
MAADGYLPDWLEDTLSEGIRQWWKLKPGPPPPKPAERHKDDSRGLVLPGYKYLGPFNGLDKGEPVNEADAAALEHDKAYDRQLDSGDNPYLKYNHADAEFQERLKEDTSFGGNLGRAVFQAKKRVLEPLGLVEEPVKTAPGKKRPVEHSPVEPDSSSGTGKAGQQPARKRLNFGQTGDADSVPDPQPLGQPPAAPPGLGTNTMATGSGAPMADNNEGADGVGNSSGNWHCDSTWMGDRVITTSTRTWALPTYNNHLYKQISSQSGASNDNHYFGYSTPWGYFDFNRFHCHFSPRDWQRLINNNWGFRPKRLNFKLFNIQVKEVTQNDGTTTIANNLTSTVQVFTDSEYQLPYVLGSAHQGCLPPFPADVFMVPQYGYLTLNNGSQAVGRSSFYCLEYFPSQMLRTGNNFTFSYTFEDVPFHSSYAHSQSLDRLMNPLIDQYLYYLSRTNTPSGTTTQSRLQFSQAGASDIRDQSRNWLPGPCYRQQRVSKTSADNNNSEYSWTGATKYHLNGRDSLVNPGPAMASHKDDEEKFFPQSGVLIFGKQGSEKTNVDIEKVMITDEEEIRTTNPVATEQYGSVSTNLQRGNRQAATADVNTQGVLPGMVWQDRDVYLQGPIWAKIPHTDGHFHPSPLMGGFGLKHPPPQILIKNTPVPANPSTTFSAAKFASFITQYSTGQVSVEIEWELQKENSKRWNPEIQYTSNYNKSVNVDFTVDTNGVYSEPRPIGTRYLTRNL

SEQ ID NO: 4023 - protein, 735 aa, synthetic construct
  REGION 1..735: note = source = /note="Description of Artificial Sequence: Synthetic polypeptide"
MAADGYLPDWLEDTLSEGIRQWWKLKPGPPPPKPAERHKDDSRGLVLPGYKYLGPFNGLDKGEPVNEADAAALEHDKAYDRQLDSGDNPYLKYNHADAEFQERLKEDTSFGGNLGRAVFQAKKRVLEPLGLVEEPVKTAPGKKRPVEHSPVEPDSSSGTGKAGQQPARKRLNFGQTGDADSVPDPQPLGQPPAAPSGLGTNTMATGSGAPMADNNEGADGVGNSSGNWHCDSTWMGDRVITTSTRTWALPTYNNHLYKQISSQSGASNDNHYFGYSTPWGYFDFNRFHCHFSPRDWQRLINNNWGFRPKRLNFKLFNIQVKEVTQNDGTTTIANNLTSTVQVFTDSEYQLPYVLGSAHQGCLPPFPADVFMVPQYGYLTLNNGSQAVGRSSFYCLEYFPSQMLRTGNNFTFSYTFEDVPFHSSYAHSQSLDRLMNPLIDQYLYYLSRTNTPSGTTTQSRLQFSQAGASDIRDQSRNWLPGPCYRQQRVSKTSADNNNSEYSWTGATKYHLNGRDSLVNPGPAMASHKDDEEKFFPQSGVLIFGKQGSEKTNVDIEKVMITDEEEIRTTNPVATEQYGSVSTNLQRGNRQAATADVNTQGVLPGMVWQDRDVYLQGPIWAKIPHTDGHFHPSPLMGGFGLKHPPPQILIKNTPVPANPSTTFSAAKFASFITQYSTGQVSVEIEWELQKENSKRWNPEIQCTSNYNKSVNVDFTVDTNGVYSEPRPIGTRYLTRNL

SEQ ID NO: 4024 - protein, 735 aa, synthetic construct
  REGION 1..735: note = source = /note="Description of Artificial Sequence: Synthetic polypeptide"
MAADGYLPDWLEDTLSEGIRQWWKLKPGPPPPKPAERHKDDSRGLVLPGYKYLGPFNGLDKGEPVNEADAAALEHDKAYDRQLDSGDNPYLKYNHADAEFQERLKEDTSFGGNLGRAVFQAKKRVLEPLGLVEEPVKTAPGKKRPVEHSPVEPDSSSGTGKAGQQPARKRLNFGQTGDADSVPDPQPLGQPPAAPSGLGTNTMATGSGAPMADNNEGADGVGNSSGNWHCDSTWMGDRVITTSTRTWALPTYNNHLYKQISSQSGASNDNHYFGYSTPWGYFDFNRFHCHFSPRDWQRLINNNWGFRPKRLNFKLFNIQVKEVTQNDGTTTIANNLTSTVQVFTDSEYQLPYVLGSAHQGCLPPFPADVFMVPQYGYLTLNNGSQAVGRSSFYCLEYFPSQMLRTGNNFTFSYTFEDVPFHSSYAHSQSLDRLMNPLIDQYLYYLSRTNTPSGTTTQSRLQFSQAGASDIRDQSRNWLPGPCYRQQRVSKTSADNNNSEYSWTGATKYHLNGRDSLVNPGPAMASHKDDEEKFFPQSGVLIFGKQGSEKTNVDIEKVMITDEEEIRTTNPVATEQYGSVSTNLQRGNRQAATADVNTQGVLPGMVWQDRDVYLQGPIWAKIPHTDGHFHPSPLMGGFGLKHPPPQILIKNTPVPANPSTTFSAAKFASFITRYSTGQVSVEIEWELQKENSKRWNPEIQYTSNYNKSVNVDFTVDTNGVYSEPRPIGTRYLTRNL

SEQ ID NO: 4025 - protein, 735 aa, synthetic construct
  REGION 1..735: note = source = /note="Description of Artificial Sequence: Synthetic polypeptide"
MAADGYLPDWLEDTLSEGIRQWWKLKPGPPPPKPAERHKDDSRGLVLPGYKYLGPFNGLDKGEPVNEADAAALEHDKAYDRQLDSGDNPYLKYNHADAEFRERLKEDTSFGGNLGRAVFQAKKRVLEPLGLVEEPVKTAPGKKRPVEHSPVEPDSSSGTGKAGQQPARKRLNFGQTGDADSVPDPQPLGQPPAAPSGLGTNTMATGSGAPMADNNEGADGVGNSSGNWHCDSTWMGDRVITTSTRTWALPTYNNHLYKQISSQSGASNDNHYFGYSTPWGYFDFNRFHCHFSPRDWQRLINNNWGFRPKRLNFKLFNIQVKEVTQNDGTTTIANNLTSTVQVFTDSEYQLPYVLGSAHQGCLPPFPADVFMVPQYGYLTLNNGSQAVGRSSFYCLEYFPSQMLRTGNNFTFSYTFEDVPFHSSYAHSQSLDRLMNPLIDQYLYYLSRTNTPSGTTTQSRLQFSQAGASDIRDQSRNWLPGPCYRQQRVSKTSADNNNSEYSWTGATKYHLNGRDSLVNPGPAMASHKDDEEKFFPQSGVLIFGKQGSEKTNVDIEKVMITDEEEIRTTNPVATEQYGSVSTNLQRGNRQAATADVNTQGVLPGMVWQDRDVYLQGPIWAKIPHTDGHFHPSPLMGGFGLKHPPPQILIKNTPVPANPSTTFSAAKFASFITQYSTGQVSVEIEWELQKENSKRWNPEIQYTSNYNKSVNVDFTVDTNGVYSEPRPIGTRYLTRNL

SEQ ID NO: 4026 - protein, 735 aa, synthetic construct
  REGION 1..735: note = source = /note="Description of Artificial Sequence: Synthetic polypeptide"
MAADGYLPDWLEDTLSEGIRQWWKLKPGPPPPKPAERHKDDSRGLVLPGYKYLGPFNGLDKGEPVNEADAAALEHDKAYDRQLDSGDNPYLKHNHADAEFQERLKEDTSFGGNLGRAVFQAKKRVLEPLGLVEEPVKTAPGKKRPVEHSPVEPDSSSGTGKAGQQPARKRLNFGQTGDADSVPDPQPLGQPPAAPSGLGTNTMATGSGAPMADNNEGADGVGNSSGNWHCDSTWMGDRVITTSTRTWALPTYNNHLYKQISSQSGASNDNHYFGYSTPWGYFDFNRFHCHFSPRDWQRLINNNWGFRPKRLNFKLFNIQVKEVTQNDGTTTIANNLTSTVQVFTDSEYQLPYVLGSAHQGCLPPFPADVFMVPQYGYLTLNNGSQAVGRSSFYCLEYFPSQMLRTGNNFTFSYTFEDVPFHSSYAHSQSLDRLMNPLIDQYLYYLSRTNTPSGTTTQSRLQFSQAGASDIRDQSRNWLPGPCYRQQRVSKTSADNNNSEYSWTGATKYHLNGRDSLVNPGPAMASHKDDEEKFFPQSGVLIFGKQGSEKTNVDIEKVMITDEEEIRTTNPVATEQYGSVSTNLQRGNRQAATADVNTQGVLPGMVWQDRDVYLQGPIWAKIPHTDGHFHPSPLMGGFGLKHPPPQILIKNTPVPANPSTTFSAAKFASFITQYSTGQVSVEIEWELQKENSKRWNPEIQYTSNYNKSVNVDFTVDTNGVYSEPRPIGTRYLTRNL

SEQ ID NO: 4027 - protein, 735 aa, synthetic construct
  REGION 1..735: note = source = /note="Description of Artificial Sequence: Synthetic polypeptide"
MAADGYLPDWLEDTLSEGIRQWWKLKPGPPPPKPAERHKDDSRGLVLPGYKYLGPFNGLDKGEPVNEADAAALEHDKAYDRQLDSGDNPYLKYNHADAEFQERLKEDTSFGGNLGRAVFQAKKRVLEPLGLVEEPVKTAPGKKRPVEHSPVEPDSSSGTGKAGQQPARKRLNFGQTGDADSVPDPQPLGQPPAAPSGLGTNTMATGSGAPMADNNEGADGVGNSSGNWHCDSTWMGDRVITTSTRTWALPTYNNHLYKQISSQSGASNDNHYFGYSTPWGYFDFNRFHCHFSPRDWQRLINNNWGFRPKRLNFKLFNIQVKEVTQNDGTTTIANNLTSTVQVFTDSEYQLPYVLGSAHQGCLPPFPADVFMVPQYGYLTLNNGSRAVGRSSFYCLEYFPSQMLRTGNNFTFSYTFEDVPFHSSYAHSQSLDRLMNPLIDQYLYYLSRTNTPSGTTTQSRLQFSQAGASDIRDQSRNWLPGPCYRQQRVSKTSADNNNSEYSWTGATKYHLNGRDSLVNPGPAMASHKDDEEKFFPQSGVLIFGKQGSEKTNVDIEKVMITDEEEIRTTNPVATEQYGSVSTNLQRGNRQAATADVNTQGVLPGMVWQDRDVYLQGPIWAKIPHTDGHFHPSPLMGGFGLKHPPPQILIKNTPVPANPSTTFSAAKFASFITQYSTGQVSVEIEWELQKENSKRWNPEIQYTSNYNKSVNVDFTVDTNGVYSEPRPIGTRYLTRNL

SEQ ID NO: 4028 - protein, 735 aa, synthetic construct
  REGION 1..735: note = source = /note="Description of Artificial Sequence: Synthetic polypeptide"
MAADGYLPDWLEDTLSEGIRQWWKLKPGPPPPKPAERHKDDSRGLVLPGYKYLGPFNGLDKGEPVNEADAAALEHDKAYDRQLDSGDNPYLKYNHADAEFQERLKEDTSFGGNLGRAVFQAKKRVLEPLGLVEEPVKTAPGKKRPVEHSPVEPDSSSGTGKAGQQPARKRLNFGQTGDADSVPDPQPLGQPPAAPSGLGTNTMATGSGAPMADNNEGADGVGNSSGNWHCDSTWMGDRVITTSTRTWALPTYNNHLYKQISSQSGASNDNHYFGYSTPWGYFDFNRFHCHFSPRDWQRLINNNWGFRPKRLNFKLFNIQVKEVTQNDGTTTIANNLTSTVQVFTDSEYQLPYVLGSAHQGCLPPFPADVFMVPQYGYLTLNNGSQAVGRSSFYCLEYFPSQMLRTGNNFTFSYTFEDVPFHSSYAHSQSLDRLMNPLIDQYLYYLSRTNTPSGTTTQSRLQFSQAGASDIRDQSRNWLPGPCYRQQRVSKTSADNNNSEYSWTGATKYHLNGRDSLVNPGPAMASHKDDEEKFFPQSGVLIFGKQGSEKTNVDIEKVVITDEEEIRTTNPVATEQYGSVSTNLQRGNRQAATADVNTQGVLPGMVWQDRDVYLQGPIWAKIPHTDGHFHPSPLMGGFGLKHPPPQILIKNTPVPANPSTTFSAAKFASFITQYSTGQVSVEIEWELQKENSKRWNPEIQYTSNYNKSVNVDFTVDTNGVYSEPRPIGTRYLTRNL

SEQ ID NO: 4029 - protein, 735 aa, synthetic construct
  REGION 1..735: note = source = /note="Description of Artificial Sequence: Synthetic polypeptide"
MAADGYLPDWLEDTLSEGIRQWWKLKPGPPPPKPAERHKDDSRGLVLPGYKYLGPFNGLDKGEPVNEADAAALEHDKAYDRQLDSGDNPYLKYNHADAEFQERLKEDTSFGGNLGRAVFQAKKRVLEPLGLVEEPVKTAPGKKRPVEHSPVEPDSSSGTGKAGQQPARKRLNFGQTGDADSVPDPQPLGQPPAAPSGLGTNTMATGSGAPMADNNEGADGVGNSSGNWHCDSTWMGDRVITTSTRTWALPTYNNHLYKQISSQSGASNDNHYFGYSTPWGYFDFNRFHCHFSPRDWQRLINNNWGFRPKRLNFKLFNIQVKEVTQNDGTTTIANNLTSTVQVFTDSEYQLPYVLGSAHQGCLPPFPADVFMVPQYGYLTLNNGSQAVGRSSFYCLEYFPSQMLRTGNNFTFSHTFEDVPFHSSYAHSQSLDRLMNPLIDQYLYYLSRTNTPSGTTTQSRLQFSQAGASDIRDQSRNWLPGPCYRQQRVSKTSADNNNSEYSWTGATKYHLNGRDSLVNPGPAMASHKDDEEKFFPQSGVLIFGKQGSEKTNVDIEKVMITDEEEIRTTNPVATEQYGSVSTNLQRGNRQAATADVNTQGVLPGMVWQDRDVYLQGPIWAKIPHTDGHFHPSPLMGGFGLKHPPPQILIKNTPVPANPSTTFSAAKFASFITQYSTGQVSVEIEWELQKENSKRWNPEIQYTSNYNKSVNVDFTVDTNGVYSEPRPIGTRYLTRNL

SEQ ID NO: 4030 - protein, 735 aa, synthetic construct
  REGION 1..735: note = source = /note="Description of Artificial Sequence: Synthetic polypeptide"
MAADGYLPDWLEDTLSEGIRQWWKLKPGPPPPKPAERHKDDSRGLVLPGYKYLGPFNGLDKGEPVNEADAAALEHDKAYDRQLDSGDNPYLKYNHADAEFQERLKEDTSFGGNLGRAVFQAKKRVLEPLGLVEEPVKTAPGKKRPVEHSPVEPDSSSGTGKAGQQPARKRLNFGQTGDADSVPDPQPLGQPPAAPSGLGTNTMATGSGAPMADNNEGADGVGNSSGNWHCDSTWMGGRVITTSTRTWALPTYNNHLYKQISSQSGASNDNHYFGYSTPWGYFDFNRFHCHFSPRDWQRLINNNWGFRPKRLNFKLFNIQVKEVTQNDGTTTIANNLTSTVQVFTDSEYQLPYVLGSAHQGCLPPFPADVFMVPQYGYLTLNNGSQAVGRSSFYCLEYFPSQMLRTGNNFTFSYTFEDVPFHSSYAHSQSLDRLMNPLIDQYLYYLSRTNTPSGTTTQSRLQFSQAGASDIRDQSRNWLPGPCYRQQRVSKTSADNNNSEYSWTGATKYHLNGRDSLVNPGPAMASHKDDEEKFFPQSGVLIFGKQGSEKTNVDIEKVMITDEEEIRTTNPVATEQYGSVSTNLQRGNRQAATADVNTQGVLPGMVWQDRDVYLQGPIWAKIPHTDGHFHPSPLMGGFGLKHPPPQILIKNTPVPANPSTTFSAAKFASFITQYSTGQVSVEIEWELQKENSKRWNPEIQYTSNYNKSVNVDFTVDTNGVYSEPRPIGTRYLTRNL

SEQ ID NO: 4031 - protein, 735 aa, synthetic construct
  REGION 1..735: note = source = /note="Description of Artificial Sequence: Synthetic polypeptide"
MAADGYLPDWLEDTLSEGIRQWWKLKPGPPPPKPAERHKDDSRGLVLPGYKYLGPFNGLDKGEPVNEADAAALEHDKAYDRQLDSGDNPYLKYNHADAEFQERLKEDTSFGGNLGRAVFQAKKRVLEPLGLVEEPVKTAPGKKRPVEHSPVEPDSSSGTGKAGQQPARKRLNFGQTGDADSVPDPQPLGQPPAAPSGLGTNTMATGSGAPMADNNEGADGVGNSSGNWHCDSTWMGDRVITTSTRTWALPTYNNHLYKQISSQSGASNDNHYFGYSTPWGYFDFNRFHCHFSPRDWQRLINNNWGFRPKRPNFKLFNIQVKEVTQNDGTTTIANNLTSTVQVFTDSEYQLPYVLGSAHQGCLPPFPADVFMVPQYGYLTLNNGSQAVGRSSFYCLEYFPSQMLRTGNNFTFSYTFEDVPFHSSYAHSQSLDRLMNPLIDQYLYYLSRTNTPSGTTTQSRLQFSQAGASDIRDQSRNWLPGPCYRQQRVSKTSADNNNSEYSWTGATKYHLNGRDSLVNPGPAMASHKDDEEKFFPQSGVLIFGKQGSEKTNVDIEKVMTTDEEEIRTTNPVATEQYGSVSTNLQRGNRQAATADVNTQGVLPGMVWQDRDVYLQGPIWAKIPHTDGHFHPSPLMGGFGLKHPPPQILIKNTPVPANPSTTFSAAKFASFITQYSTGQVSVEIEWELQKENSKRWNPEIQYTSNYNKSVNVDFTVDTNGVYSEPRPIGTRYLTRNL

SEQ ID NO: 4032 - protein, 735 aa, synthetic construct
  REGION 1..735: note = source = /note="Description of Artificial Sequence: Synthetic polypeptide"
MAADGYLPDWLEDTLSEGIRQWWKLKPGPPPPKPAERHKDDSRGLVLPGYKYLGPFNGLDKGEPVNEADAAALEHDKAYDRQLDSGDNPYLKYNHADAEFRERLKEDTSFGGNLGRAVFQAKKRVLEPLGLVEEPVKTAPGKKRPVEHSPVEPDSSSGTGKAGQQPARKRLNFGQTGDADSVPDPQPLGQPPAAPSGLGTNTMATGSGAPMADNNEGADGVGNSSGNWHCDSTWMGDRVITTSTRTWALPTYNNHLYKQISSQSGASNDNHYFGYSTPWGYFDFNRFHCHFSPRDWQRLINNNWGFRPKRLNFKLFNIQVKEVTQNDGTTTIANNLTSTVQVFTDSEYQLPYVLGSAHQGCLPPFPADVFMVPQYGYLTLNNGSQAVGRSSFYCLEYFPSQMLRTGNNFTFSYTFEDVPFHSSYAHSQSLDRLMNPLIDQYLYYLSRTNTPSGTTTQSRLQFSQAGASDIRDQSRNWLPGPCYRQQRVSKTSADNNNSEYSWTGATKYHLNGRDSLVNPGPAMASHKDDEEKFFPQSGVLIFGKQGSEKTNVDIEKVMTTDEEEIRTTNPVATEQYGSVSTNLQRGNRQAATADVNTQGVLPGMVWQDRDVYLQGPIWAKIPHTDGHFHPSPLMGGFGLKHPPPQILIKNTPVPANPSTTFSAAKFASFITQYSTGQVSVEIEWELQKENSKRWNPEIQYTSNYNKSVNVDFTVDTNGVYSEPRPIGTRYLTRNL

SEQ ID NO: 4033 - protein, 735 aa, synthetic construct
  REGION 1..735: note = source = /note="Description of Artificial Sequence: Synthetic polypeptide"
MAADGYLPDWLEDTLSEGIRQWWKLKPGPPPPKPAERHKDDSRGLVLPGYKYLGPFNGLDKGEPVNEADAAALEHDKAYDRQLDSGDNPYLKYNHADAEFQERLKEDTSFGGNLGRAVFQAKKRVLEPLGLVEEPVKTAPGKKRPVEHSPVEPDPSSGTGKAGQQPARKRLNFGQTGDADSVPDPQPLGQPPAAPSGLGTNTMATGSGAPMADNNEGADGVGNSSGNWHCDSTWMGDRVITTSTRTWALPTYNNHLYKQISSQSGASNDNHYFGYSTPWGYFDFNRFHCHFSPRDWQRLINNNWGFRPKRLNFKLFNIQVKEVTQNDGTTTIANNLTSTVQVFTDSEYQLPYVLGSAHQGCLPPFPADVFMVPQYGYLTLNNGSQAVGRSSFYCLEYFPSQMLRTGNNFTFSYTFEDVPFHSSYAHSQSLDRLMNPLIDQYLYYLSRTNTPSGTTTQSRLQFSQAGASDIRDQSRNWLPGPCYRQQRVSKTSADNNNSEYSWTGATKYHLNGRDSLVNPGPAMASHKDDEEKFFPQSGVLIFGKQGSEKTNVDIEKVMITDEEEIRTTNPVATEQYGSVSTNLQRGNRQAATADVNTQGVLPGMVWQDRDVYLQGPIWAKIPHTDGHFHPSPLMGGFGLKHPPPQILIKNTPVPANPSTTFSAAKFASFITQYSTGQVSVEIEWELQKENSKRWNPEIQYTSNYNKSVNVDFTVDTNGVYSEPRPIGTRYLTRNL

SEQ ID NO: 4034 - protein, 735 aa, synthetic construct
  REGION 1..735: note = source = /note="Description of Artificial Sequence: Synthetic polypeptide"
MAADGYLPDWLEDTLSEGIRQWWKLKPGPPPPKPAERHKDDSRGLVLPGYKYLGPFNGLDKGEPVNEADAAALEHDKAYDRQLDSGDNPYLKYNHADAEFQERLKEDTSFGGNLGRAVFQAKKRVLEPLGLVEEPVKTAPGKKRPVEHSPVEPDSSSGTGKAGQQPARKRLNFGQTGDADSVPDPQPLGQPPAAPSGLGTNTMATGSGAPMADNNEGADGVGNSSGNWHCDSTWMGDRVITTSTRTWALPTYNNHLYKQISSQSGASNDNHYFGYSTPWGYFDFNRFHCHFSPRDWQRLINNNWGFRPKRLNFKLFNIQVKEVTQNDGTTTIANNLTSTVQVFTDSEYQLPYVLGSAHQGCLPPFPADVFMVPQYGYLTLNNGSQAVGRSSFYCLEYFPSQMLRTGNNFTFSYTFEDVPFHSSYAHSQSLDRLMNPLIDQYLYYLSRTNTPSGTTTQSRLQFSQAGASDIRDQSRNWLPGPCYRQQRVSKTSADNNNSEYSWTGATKYHLNGRDSLVNPGPAMASHKDDEEKFFPQSGVLIFGKQGSEKTNVDIEKVMITDEEEIRTTNPVATEQYGSVSTNLQRGNRQAATADVNTQGVLPGMVWQDRDVYLQGPIWAKIPHTDGHFHPSPLMGGFGLKHPPPQILIKNTPVPANPSTTFSAAKFASFITQYSTGQVSVEIEWELQKENSKRWNPEIQYTSNYNKSVNVDFTVDTNGVYSESRPIGTRYLTRNL

SEQ ID NO: 4035 - protein, 735 aa, synthetic construct
  REGION 1..735: note = source = /note="Description of Artificial Sequence: Synthetic polypeptide"
MAADGYLPDWLEDTLSEGIRQWWKLKPGPPPPKPAERHKDDSRGLVLPGYKYLGPFNGLDKGEPVNEADAAALEHDKAYDRQLDSGDNPYLKYNHADAEFQERLKEDTSFGGNLGRAVFQAKKRVLEPLGLVEEPVKTAPGKKRPVEHSPVEPDSSSGTGKAGQQPARKRLNFGQTGDADSVPDPQPLGQPPAAPSGLGTNTMATGSGAPMADNNEGADGVGNSSGNWHCDSTWMGDRVITTSTRTWALPTYNNHLYKQISSQSGASNDNHYFGYSTPWGYFDFNRFHCHFSPRDWQRLINNNWGFRPKRLNFKLFNIQVKEVTQNDGTTTIANNLTSTVQVFTDSEYQLPYVLGSAHQGCLPPFPADVFMVPQYGYLTPNNGSQAVGRSSFYCLEYFPSQMLRTGNNFTFSYTFEDVPFHSSYAHSQSLDRLMNPLIDQYLYYLSRTNTPSGTTTQSRLQFSQAGASDIRDQSRNWLPGPCYRQQRVSKTSADNNNSEYSWTGATKYHLNGRDSLVNPGPAMASHKDDEEKFFPQSGVLIFGKQGSEKTNVDIEKVMITDEEEIRTTNPVATEQYGSVSTNLQRGNRQAATADVNTQGVLPGMVWQDRDVYLQGPIWAKIPHTDGHFHPSPLMGGFGLKHPPPQILIKNTPVPANPSTTFSAAKFASFITQYSTGQVSVEIEWELQKENSKRWNPEIQYTSNYNKSVNVDFTVDTNGVYSEPRPIGTRYLTRNL

SEQ ID NO: 4036 - protein, 735 aa, synthetic construct
  REGION 1..735: note = source = /note="Description of Artificial Sequence: Synthetic polypeptide"
MAADGYLPDWLEDTLSEGIRQWWKLKPGPPPPKPAERHKDDSRGLVLPGYKYLGPFNGLDKGEPVNEADAAALEHDKAYDRQLDSGDNPYLKYNHADAEFQERLKEDTSFGGNLGRAVFQAKKRVLEPLGLVEEPVKTAPGKKRPVEHSPVEPDSSSGTGKAGQQPARKRLNFGQTGDADSVPDPQPLGQPPAAPSGLGTNTMATGSGAPMADNNEGADGVGNSSGNWHCDSTWMGDRVITTSTRTWALPTYNNHLYKQISSQSGASNDNHYFGYSTPWGYFDFNRFHCHFSPRDWQRLINNNWGFRPKRLNFKLFNIQVKEVTQNDGTTTIANNLTSTVQVFTDSEYQLPYVLGSAHQGCLPPFPADVFMVPQYGYLTLNNGSQAVGRSSFYCLEYFPSQMLRTGNNFTFSYTFEDVPFHSSYAHSQSLDRLMNPLIDQYLYYLSRTNTPSGTTTQSRLQFSQAGASDIRDQSRNWLPGPCYRQQRVSKTSADNNNSEYSWTGATKYHLNGRDSLVNPGPAMASHKDDEEKFFPQSGVLIFGKQGSEKTNVDIEKVMITDEEEIRTTNPVATEQYGSVSTNLQRGNRQAATADVNTQGVLPGMAWQDRDVYLQGPIWAKIPHTDGHFHPSPLMGGFGLKHPPPQILIKNTPVPANPSTTFSAAKFASFITQYSTGQVSVEIEWELQKENSKRWNPEIQYTSNYNKSVNVDFTVDTNGVYSEPRPIGTRYLTRNL

SEQ ID NO: 4037 - protein, 735 aa, synthetic construct
  REGION 1..735: note = source = /note="Description of Artificial Sequence: Synthetic polypeptide"
MAADGYLPDWLEDTLSEGIRQWWKLKPGPPPPKPAERHKDDSRGLVLPGYKYLGPFNGLDKGEPVNEADAAALEHDKAYDRQLDSGDNPYLKYNHADAEFQERLKEDTSFGGNLGRAVFQAKKRVLEPLGLVEEPVKTAPGKKRPVEHSPVEPDSSSGTGKAGQQPARKRLNFGQTGDADSVPDPQPLGQPPAAPTSLGSTTMATGSGAPMADNNEGADGVGNSSGNWHCDSQWLGDRVITTSTRTWALPTYNNHLYKQISSQSGASNDNHYFGHSTPWGYFDFNRFHCHFSPRDWQRLINNNWGFRPKRLNFKLFNIQVKEVTQNDGTTTIANNLTSTVQVFTDSEYQLPYVLGSAHQGCLPPFPADVFMVPQYGYLTLNNGSQAVGRSSFYCLEYFPSQMLRTGNNFTFSYTFEDVPFHSSYAHSQSLDRLMNPLIDQYLYYLSRTNTPSGTTTQSRLQFSQAGASDIRDQSRNWLPGPCYRQQRVSKTSADNNNSEYSWTGATKYHLNGRDSLVNPGPAMASHKDDEEKFFPQSGVLIFGKQGSEKTNVDIEKVMITDEEEIRTTNPVATEQYGSVSTNLQRGNRQAATADVNTQGVLPGMVWQDRDVYLQGPIWAKIPHTDGHFHPSPLMGGFGLKHPPPQILIKNTPVPANPSTTFSAAKFASFITQYSTGQVSVEIEWELQKENSKRWNPEIQYTSNYNKSVNVDFTVDTNGVYSEPRPIGTRYLTRNL

SEQ ID NO: 4038 - protein, 735 aa, synthetic construct
  REGION 1..735: note = source = /note="Description of Artificial Sequence: Synthetic polypeptide"
MAADGYLPDWLEDTLSEGIRQWWKLKPGPPPPKPAERHKDDSRGLVLPGYKYLGPFNGLDKGEPVNEADAAALEHDKAYDRQLDSGDNPYLKYNHADAEFQERLKEDTSFGGNLGRAVFQAKKRVLEPLGLVEEPVKTAPGKKRPVEHSPVEPDSSSGTGKAGQQPARKRLNFGQTGDADSVPDPQPLGQPPAAPSGLGTNTMATGSGAPMADNNEGADGVGNSSGNWHCDSTWMGDRVITTSTRTWALPTYNNHLYKQISSQSGASNDNHYFGYSTPWGYFDFNRFHCHFSPRDWQRLINNNWGFRPKRLNFKLFNIQVKEVTQNDGTTTIANNLTSTVQVFTDSEYQLPYVLGSAHQGCLPPFPADVFMVPQYGYLTLNNGSQAVGRSSFYCLEYFPSQMLRTGNNFTFSYTFEDVPFHSSYAHSQSLDRLMNPLIDQYLYYLSRTNTPSGTTTQSRLQFSQAGASDIRDQSRNWLPGPCYRQQRVSKTSADNNNSEYSWTGATKYHLNGRDSLVNPGPAMASHKDDEEKFFPQSGVLIFGKQGSEKTNVDIEKVMITDEEEIRTTNPVATEQYGSVSTNLQRGNRQAATADVNTQGVLPGMVWQDRDVYLQGPIWAKIPHTDGHFHPSPLMGGFGLKHPPPQILIKNTPVPANPSTTFSAAKFASFITQYSTGQASVEIEWELQKENSKRWNPEIQYTSNYNKSVNVDFTVDTNGVYSEPRPIGTRYLTRNL

SEQ ID NO: 4039 - protein, 735 aa, synthetic construct
  REGION 1..735: note = source = /note="Description of Artificial Sequence: Synthetic polypeptide"
MAADGYLPDWLEDTLSEGIRQWWKLKPGPPPPKPAERHKDDSRGLVLPGYKYLGPFNGLDKGEPVNEADAAALEHDKAYDRQLDSGDNPYLKYNHADAEFQERLKEDTSFGGNLGRAVFQAKKRVLEPLGLVEEPVKTAPGKKRPVEHSPVEPDSSSGTGKAGQQPARKRLNFGQTGDADSVPDPQPLGQPPAAPSGLGTNTMATGSGAPMADNNEGADGVGNSSGNWHCDSTWMGDRVITTSTRTWALPTYNNHLYKQISSQSGASNDNHYFGYSTPWGYFDFNRFHCHFSPRDWQRLINNNWGFRPKRLNFKLFNIQVKEVTQNDGTTTIANNLTSTVQVFTDSEYQLPYVLGSAHQGCLPPFPADVFMVPQYGYLTLNNGSQAVGRSSFYCLEYFPSQMLRTGNNFTFSYTFEDVPFHSSYAHSQSLDRLMNPLIDQYLYYLSRTNTPSGTTTQSRLQFSQAGASDIRDQSRNWLPGPCYRQQRVSKTSADNNNSEYSWTGATKYHLNGRDSLVNPGPAMASHKDDEEKFFPQSGVLIFGKQGSEKTNVDIEKVMITDEEEIRTTNPVATEQYGSVSTNLQRGNRQAATADVNTQGVLPGMVWQDRDVYLQGPIWAKIPHTDGHFHPSPLMGGFGLKHPPPQILIKNTPVPANPSTTFSAARFASFITQYSTGQVSVEIEWELQKENSKRWNPEIQYTSNYNKSVNVDFTVDTNGVYSEPRPIGTRYLTRNL

SEQ ID NO: 4040 - protein, 735 aa, synthetic construct
  REGION 1..735: note = source = /note="Description of Artificial Sequence: Synthetic polypeptide"
MAADGYLPDWLEDTLSEGIRQWWKLKPGPPPPKPAERHKDDSRGLVLPGYKYLGPFNGLDKGEPVNEADAAALEHDKAYDRQLDSGDNPYLKYNHADAEFQERLKEDTSFGGNLGRAVFQAKKRVLEPLGLVEEPVKTAPGKKRPVEHSPVEPDSSSGTGKAGQQPARKRLNFGQTGGADSVPDPQPLGQPPAAPSGLGTNTMATGSGAPMADNNEGADGVGNSSGNWHCDSTWMGDRVITTSTRTWALPTYNNHLYKQISSQSGASNDNHYFGYSTPWGYFDFNRFHCHFSPRDWQRLINNNWGFRPKRLNFKLFNIQVKEVTQNDGTTTIANNLTSTVQVFTDSEYQLPYVLGSAHQGCLPPFPADVFMVPQYGYLTLNNGSQAVGRSSFYCLEYFPSQMLRTGNNFTFSYTFEDVPFHSSYAHSQSLDRLMNPLIDQYLYYLSRTNTPSGTTTQSRLQFSQAGASDIRDQSRNWLPGPCYRQQRVSKTSADNNNSEYSWTGATKYHLNGRDSLVNPGPAMASHKDDEEKFFPQSGVLIFGKQGSEKTNVDIEKVMITDEEEIRTTNPVATEQYGSVSTNLQRGNRQAATADVNTQGVLPGMVWQDRDVYLQGPIWAKIPHTDGHFHPSPLMGGFGLKHPPPQILIKNTPVPANPSTTFSAAKFASFITQYSTGQVSVEIEWELQKENSKRWNPEIQYTSNYNKSVNVDFTVDTNGVYSEPRPIGTRYLTRNL

SEQ ID NO: 4041 - protein, 735 aa, synthetic construct
  REGION 1..735: note = source = /note="Description of Artificial Sequence: Synthetic polypeptide"
MAADGYLPDWLEDTLSEGIRQWWKLKPGPPPPKPAERHKDDSRGLVLPGYKYLGPFNGLDKGEPVNEADAAALEHDKAYDRQLDSGDNPYLKYNHADAEFQERLKEDTSFGGNLGRAVFQAKKRVLEPLGLVEEPVKTAPGKKRPVEHSPVEPDSSSGTGKAGQQPARKRLNFGQTGDADSVPDPQPLGQPPAAPSGLGTNTMATGSGAPMADNNEGADGVGNSSGNWHCDSTWMGDRVITTSTRTWALPTYNNHLYKQISSQSGASNDNHYFGYSTPWGYFDFNRFHCHFSPRDWQRLINNNWGFRPKRLNFKLFNIQVKEVTQNDGTTTIANNLTSTVQVFTDSEYQLPYVLGSAHQGCLPPFPADVFMVPQYGYLTLNNGSQAVGRSSFYCLEYFPSQMLRTGNNFTFSYTFEDVPFHSSYAHSQSLDRLMNPLIDQYLYYLSRTNTPSGTTTQSRLQFSQAGASDIRDQSRNWLPGPCYRQQRVSKTSADNNNSEYSWTGATKYHLNGRDSLVNPGPAMASHKDDEEKFFPQSGVLIFGKQGSEKTNVDIEKVMITDEEEIRTTNPVATEQYGSVSTNLQRGNRQAATADVNTQGVLPGMVWQDRDVYLQGPIWAKIPHTDGHFHPSPLMGGFGLKHPPPQILIKNTPVPANPSTTFSAAKFASFITQYSTGQVSVEIEWELQKENSKRWNPEIQYTSNYNKSANVDFTVDTNGVYSEPRPIGTRYLTRNL

SEQ ID NO: 4042 - protein, 735 aa, synthetic construct
  REGION 1..735: note = source = /note="Description of Artificial Sequence: Synthetic polypeptide"
MAADGYLPDWLEDTLSEGIRQWWKLKPGPPPPKPAERHKDDSRGLVLPGYKYLGPFNGLDKGEPVNEADAAALEHDKAYDRQLDSGDNPYLKYNHADAEFQERLKEDTSFGGNLGRAVFQAKKRVLEPLGLVEEPVKTAPGKKRPVEHSPVEPDSSSGTGKAGQQPARKRLNFGQTGDADSVPDPQPLGQPPAAPSGLGTNTMATGSGAPMADNNEGADGVGNSSGNWHCDSTWMGDRVITTSTRTWALPTYNNHLYKQISSQSGASNDNHYFGYSTPWGYFDFNRFHCHFSPRDWQRLINNNWGFRPKRLNFKLFNIQVKEVTQNDGTTTIANNLTSTVQVFTDSEYQLPYVLGSAHQGCLPPFPADVFMVPQYGYLTLNNGSQAVGRSSFYCLEYFPSQMLRTGNNFTFSYTFEDVPFHSSYAHSQSLDRLMNPLIDQYLYYLSRTNTPSGTTTQSRLQFSQAGASDIRDRSRNWLPGPCYRQQRVSKTSADNNNSEYSWTGATKYHLNGRDSLVNPGPAMASHKDDEEKFFPQSGVLIFGKQGSEKTNVDIEKVMITDEEEIRTTNPVATEQYGSVSTNLQRGNRQAATADVNTQGVLPGMVWQDRDVYLQGPIWAKIPHTDGHFHPSPLMGGFGLKHPPPQILIKNTPVPANPSTTFSAAKFASFITQYSTGQVSVEIEWELQKENSKRWNPEIQYTSNYNKSVNVDFTVDTNGVYSEPRPIGTRYLTRNL

SEQ ID NO: 4043 - protein, 735 aa, synthetic construct
  REGION 1..735: note = source = /note="Description of Artificial Sequence: Synthetic polypeptide"
MAADGYLPDWLEDTLSEGIRQWWKLKPGPPPPKPAERHKDDSRGLVLPGYKYLGPFNGLDKGEPVNEADAAALEHDKAYDRQLDSGDNPYLKYNHADAEFQERLKEDTSFGGNLGRAVFQAKKRVLEPLGLVEEPVKTAPGKKRPVEHSPVEPDSSSGTGKAGQQPARKRLNFGQTGDADSVPDPQPLGQPPAAPSGLGTNTMATGSGAPMADNNEGADGVGNSSGNWHCDSTWMGDRVITTSTRTWALPTYNNHLYKQISSQSGASNDNHYFGYSTPWGYFDFNRFHCHFSPRDWQRLINNNWGFRPKRLNFKLFNIQVKEVTQNDGTTTIANNLTSTVQVFTDSEYQLPYVLGSAHQGCLPPFPADVFMVPQYGYLTLNNGSQAVGRSSFYCLEYFPSQMLRTGNNFTFSYTFEDVPFHSSYAHSQSLDRLMNPLIDQYLYYLSRTNTPSGTTTQSRLQFSQAGASDIRDQSRNWLPGPCYRQQRVSKASADNNNSEYSWTGATKYHLNGRDSLVNPGPAMASHKDDEEKFFPQSGVLIFGKQGSEKTNVDIEKVMITDEEEIRTTNPVATEQYGSVSTNLQRGNRQAATADVNTQGVLPGMVWQDRDVYLQGPIWAKIPHTDGHFHPSPLMGGFGLKHPPPQILIKNTPVPANPSTTFSAAKFASFITQYSTGQVSVEIEWELQKENSKRWNPEIQYTSNYNKSVNVDFTVDTNGVYSEPRPIGTRYLTRNL

SEQ ID NO: 4044 - protein, 735 aa, synthetic construct
  REGION 1..735: note = source = /note="Description of Artificial Sequence: Synthetic polypeptide"
MAADGYLPDWLEDTLSEGIRQWWKLKPGPPPPKPAERHKDDSRGLVLPGYKYLGPFNGLDKGEPVNEADAAALEHDKAYDRQLDSGDNPYLKYNHADAEFQERLKEDTSFGGNLGRAVFQAKKRVLEPLGLVEEPVKTAPGKKRPVEHSPVEPDSSSGTGKAGQQPARKRLNFGQTGDADSVPDPQPLGQPPAAPSGLGTNTMATGSGAPMADNNEGADGVGNSSGNWHCDSTWMGDRVITTSTRTWALPTYNNHLYKQISSQSGASNDNHYFGYSTPWGYFDFNRFHCHFSPRDWQRLINNNWGFRPKRLNFKLFNIQVKEVTQNDGTTTIANNLTSTVQVFTDSEYQLPYVLGSAHQGCLPPFPADVFMVPQYGYLTLNNGSQAVGRSSFYCLEYFPSQMLRTGNNFTFSYTFEDVPFHSSYAHSQSLDRLMNPLIDQYLYYLSRTNTPSGTTTQSRLQFSQAGASDIRDQSRNWLPGPCYRQQRVSKTSADNNNSEYSWTGATKHHLNGRDSLVNPGPAMASHKDDEEKFFPQSGVLIFGKQGSEKTNVDIEKVMITDEEEIRTTNPVATEQYGSVSTNLQRGNRQAATADVNTQGVLPGMVWQDRDVYLQGPIWAKIPHTDGHFHPSPLMGGFGLKHPPPQILIKNTPVPANPSTTFSAAKFASFITQYSTGQVSVEIEWELQKENSKRWNPEIQYTSNYNKSVNVDFTVDTNGVYSEPRPIGTRYLTRNL

SEQ ID NO: 4045 - protein, 735 aa, synthetic construct
  REGION 1..735: note = source = /note="Description of Artificial Sequence: Synthetic polypeptide"
MAADGYLPDWLEDTLSEGIRQWWKLKPGPPPPKPAERHKDDSRGLVLPGYKYLGPFNGLDKGEPVNEADAAALEHDKAYDRQLDSGDNPYLKYNHADAEFQERLKEDTSFGGNLGRAVFQAKKRVLEPLGLVEEPVKTAPGKKRPVEHSPVEPDSSSGTGKAGQQPARKRLNFGQTGDADSVPDPQPLGQPPAAPSGLGTNTMATGSGAPMADNNEGADGVGNSSGNWHCDSTWMGDRVITTSTRTWALPTYNNHLYKQISSQSGASNDNHYFGYSTPWGYFDFNRFHCHFSPRDWQRLINNNWGFRPKRLNFKLFNIQVKEVTQNDGTTTIANNLTGTVQVFTDSEYQLPYVLGSAHQGCLPPFPADVFMVPQYGYLTLNNGSQAVGRSSFYCLEYFPSQMLRTGNNFTFSYTFEDVPFHSSYAHSQSLDRLMNPLIDQYLYYLSRTNTPSGTTTQSRLQFSQAGASDIRDQSRNWLPGPCYRQQRVSKTSADNNNSEYSWTGATKYHLNGRDSLVNPGPAMASHKDDEEKFFPQSGVLIFGKQGSEKTNVDIEKVMITDEEEIRTTNPVATEQYGSVSTNLQRGNRQAATADVNTQGVLPGMVWQDRDVYLQGPIWAKIPHTDGHFHPSPLMGGFGLKHPPPQILIKNTPVPANPSTTFSAAKFASFITQYSTGQVSVEIEWELQKENSKRWNPEIQYTSNYNKSVNVDFTVDTNGVYSEPRPIGTRYLTRNL

SEQ ID NO: 4046 - protein, 735 aa, synthetic construct
  REGION 1..735: note = source = /note="Description of Artificial Sequence: Synthetic polypeptide"
MAADGYLPDWLEDTLSEGIRQWWKLKPGPPPPKPAERHKDDSRGLVLPGYKYLGPFNGLDKGEPVNEADAAALEHDKAYDRQLDSGDNPYLKYNHADAEFQERLKEDTSFGGNLGRAVFRAKKRVLEPLGLVEEPVKTAPGKKRPVEHSPVEPDSSSGTGKAGQQPARKRLNFGQTGDADSVPDPQPLGQPPAAPSGLGTNTMATGSGAPMADNNEGADGVGNSSGNWHCDSTWMGDRVITTSTRTWALPTYNNHLYKQISSQSGASNDNHYFGYSTPWGYFDFNRFHCHFSPRDWQRLINNNWGFRPKRLNFKLFNIQVKEVTQNDGTTTIANNLTSTVQVFTDSEYQLPYVLGSAHQGCLPPFPADVFMVPQYGYLTLNNGSQAVGRSSFYCLEYFPSQMLRTGNNFTFSYTFEDVPFHSSYAHSQSLDRLMNPLIDQYLYYLSRTNTPSGTTTQSRLQFSQAGASDIRDQSRNWLPGPCYRQQRVSKTSADNNNSEYSWTGATKYHLNGRDSLVNPGPAMASHKDDEEKFFPQSGVLIFGKQGSEKTNVDIEKVMITDEEEIRTTNPVATEQYGSVSTNLQRGNRQAATADVNTQGVLPGMVWQDRDVYLQGPIWAKIPHTDGHFHPSPLMGGFGLKHPPPQILIKNTPVPANPSTTFSAAKFASFITQYSTGQVSVEIEWELQKENSKRWNPEIQYTSNYNKSVNVDFTVDTNGVYSEPRPIGTRYLTRNL

SEQ ID NO: 4047 - protein, 735 aa, synthetic construct
  REGION 1..735: note = source = /note="Description of Artificial Sequence: Synthetic polypeptide"
MAADGYLPDWLEDTLSEGIRQWWKLKPGPPPPKPAERHKDDSRGLVLPGYKYLGPFNGLDKGEPVNEADAAALEHDKAYDRQLDSGDNPYLKYNHADAEFQERLKEDTSFGGNLGRAVFQAKKRVLEPLGLVEEPVKTAPGKKRPVEHSPVEPDSSSGTGKAGQQPARKRLNFGQTGDADSVPDPQPLGQPPAAPSGLGTNTMATGSGAPMADNNEGADGVGNSSGNWHCDSTWMGDRVITTSTRTWALPTYNNHLYKQISSQSGASNDNHYFGYSTPWGYFDFNRFHCHFSPRDWQRLINNNWGFRPKRLNFKLFNIQVKEVTQNDGTTTIANNLTSTVQVFTDSEYQLPYVLGSAHQGCLPPFPADVFMVPQYGYLTLNNGSQAVGRSSFYCLEYFPSQMLRTGNNFTFSYTFEDVPFHSSYAHSQSLDRLMNPLIDQYLYYLSRTNTPSGTTTQSRLQFSQAGASDIRDQSRNWLPGPCYRQQRVSKTSADNNNSEYSWTGATKYHLNGRDSLVNPGPAMASHKDDEEKFFPQSGVLIFGKQGSEKTNVDIEKVMITDEEEIRTTNPVATEQYGSVSTNLQRGNRQAATADVNTQGVLPGTVWQDRDVYLQGPIWAKIPHTDGHFHPSPLMGGFGLKHPPPQILIKNTPVPANPSTTFSAAKFASFITQYSTGQASVEIEWELQKENSKRWNPEIQYTSNYNKSVNVDFTVDTNGVYSEPRPIGTRYLTRNL

SEQ ID NO: 4048 - protein, 735 aa, synthetic construct
  REGION 1..735: note = source = /note="Description of Artificial Sequence: Synthetic polypeptide"
MAADGYLPDWLEDTLSEGIRQWWKLKPGPPPPKPAERHKDASRGLVLPGYKYLGPFNGLDKGEPVNEADAAALEHDKAYDRQLDSGDNPYLKYNHADAEFQERLKEDTSFGGNLGRAVFQAKKRVLEPLGLVEEPVKTAPGKKRPVEHSPVEPDSSSGTGKAGQQPARKRLNFGQTGDADSVPDPQPLGQPPAAPTSLGSTTMATGSGAPMADNNEGADGVGNSSGNWHCDSQWLGDRVITTSTRTWALPTYNNHLYKQISSQSGASNDNHYFGYSTPWGYFDFNRFHCHFSPRDWQRLINNNWGFRPKRLNFKLFNIQVKEVTQNDGTTTIANNLTSTVQVFTDSEYQLPYVLGSAHQGCLPPFPADVFMVPQYGYLTLNNGSQAVGRSSFYCLEYFPSQMLRTGNNFTFSYTFEDVPFHSSYAHSQSLDRLMNPLIDQYLYYLSRTNTPSGTTTQSRLQFSQAGASDIRDQSRNWLPGPCYRQQRVSKTSADNNNSEYSWTGATKYHLNGRDSLVNPGPAMASHKDDEEKFFPQSGVLIFGKQGSEKTNVDIEKVMITDEEEIRTTNPVATEQYGSVSTNLQRGNRQAATADVNTQGVLPGMVWQDRDVYLQGPIWAKIPHTDGHFHPSPLMGGFGLKHPPPQILIKNTPVPANPSTTFSAAKFASFITQYSTGQVSVEIEWELQKENSKRWNPEIQYTSNYNKSVNVDFTVDTNGVYSEPRPIGTRYLTRNL

SEQ ID NO: 4049 - protein, 735 aa, synthetic construct
  REGION 1..735: note = source = /note="Description of Artificial Sequence: Synthetic polypeptide"
MAADGYLPDWLEDTLSEGIRQWWKLKPGPPPPKPAERHKDDSRGLVLPGYKYLGPFNGLDKGEPVNEADAAALEHDKAYDRQLDSGDNPYLKYNHADAEFQERLKEDTSFGGNLGRAVFQAKKRVLEPLGLVEEPVKTAPGKKRPVEHSPVEPDSSSGTGKAGQQPARKRLNFGQTGDADSVPDPQPLGQPPAAPSGLGTNTMATGSGAPMADNNEGADGVGNSSGNWHCDSTWMGDRVITTSTRTWALPTYNNHLYKQISSQSGAPNDNHYFGYSTPWGYFDFNRFHCHFSPRDWQRLINNNWGFRPKRLNFKLFNIQVKEVTQNDGTTTIANNLTSTVQVFTDSEYQLPYVLGSAHQGCLPPFPADVFMVPQYGYLTLNNGSQAVGRSSFYCLEYFPSQMLRTGNNFTFSYTFEDVPFHSSYAHSQSLDRLMNPLIDQYLYYLSRTNTPSGTTTQSRLQFSQAGASDIRDQSRNWLPGPCYRQQRVSKTSADNNNSEYSWTGATKYHLNGRDSLVNPGPAMASHKDDEEKFFPQSGVLIFGKQGSEKTNVDIEKVMITDEEEIRTTNPVATEQYGSVSTNLQRGNRQAATADVNTQGVLPGMVWQDRDVYLQGPIWAKIPHTDGHFHPSPLMGGFGLKHPPPQILIKNTPVPANPSTTFSAAKFASFITQYSTGQASVEIEWELQKENSKRWNPEIQYTSNYNKSVNVDFTVDTNGVYSEPRPIGTRYLTRNL

SEQ ID NO: 4050 - protein, 735 aa, synthetic construct
  REGION 1..735: note = source = /note="Description of Artificial Sequence: Synthetic polypeptide"
MAADGYLPDWLEDTLSEGIRQWWKLKPGPPPPKPAERHKDDSRGLVLPGYKYLGPFNGLDKGEPVNEADAAALEHDKAYDRQLDSGDNPYLKYNHADAEFQERLKEDTSFGGNLGRAVFQAKKRVLEPLGLVEEPVKTAPGKKRPVEHSPVEPDSSSGTGKAGQQPARKRLNFGQTGDADSVPDPQPLGQPPAAPTSLGSTTMATGSGAPMADNNEGADGVGNSSGNWHCDSQWLGDRVITTSTRTWALPTYNNHLYKQISSQSGASNDNHYFGYSTPWGYFDFNRFHCHFSPRDWQRLINNNWGFRPKRLNFKLFNIQVKEVTQNDGTTTIANNLTSTVQVFTDSEYQLPYVLGSAHQGCLPPFPADVFMVPQYGYLTLNNGSQAVGRSSFYCLEYFPSQMLRTGNNFTFSYTFEDVPFHSSYAHSQSLDRLMNPLIDQYLYYLSRTNTPSGTTTQSRLQFSQAGASDIRDQSRNWLPGPCYRQQRVSKTSADNNNSEYSWTGATKYHLNGRDSLVNPGPAMASHKDDEEKFFPQSGVLIFGKQGSEKTNVDIEKVMITDEEEIRTTNPVATEQYGSVSTNLQRGNRQAATADVNTQGVLPGMVWQDRDVYLQGPIWAKIPHTDGHFHPSPLMGGFGLKHPPPQILIKNTPVPANPSTTFSAAKFASFITQYSTGQVSVEIEWELQKENSKRWNPEIQYTSNYNKSVNVDFTVDTNGVYSEPRPIGTRYLTRNL

SEQ ID NO: 4051 - protein, 735 aa, synthetic construct
  REGION 1..735: note = source = /note="Description of Artificial Sequence: Synthetic polypeptide"
MAADGYLPDWLEDILSEGIRQWWKLKPGPPPPKPAERHKDASRGLVLPGYKYLGPFNGLDKGEPVNEADAAALEHDKAYDRQLDSGDNPYLKYNHADAEFQERLKEDTSFGGNLGRAVFQAKKRVLEPLGLVEEPVKTAPGKKRPVEHSPVEPDSSSGTGKAGQQPARKRLNFGQTGDADSVPDPQPLGQPPAAPTSLGSTTMATGSGAPMADNNEGADGVGNSSGNWHCDSQWLGDRVITTSTRTWALPTYNNHLYKQISSQSGASNDNHYFGYSTPWGYFDFNRFHCHFSPRDWQRLINNNWGFRPKRLNFKLFNIQVKEVTQNDGTTTIANNLTSTVQVFTDSEYQLPYVLGSAHQGCLPPFPADVFMVPQYGYLTLNNGSQAVGRSSFYCLEYFPSQMLRTGNNFTFSYTFEDVPFHSSYAHSQSLDRLMNPLIDQYLYYLSRTNTPSGTTTQSRLQFSQAGASDIRDQSRNWLPGPCYRQQRVSKTSADNNNSEYSWTGATKYHLNGRDSLVNPGPAMASHKDDEEKFFPQSGVLIFGKQGSEKTNVDIEKVMITDEEEIRTTNPVATEQYGSVSTNLQRGNRQAATADVNTQGVLPGMVWQDRDVYLQGPIWAKIPHTDGHFHPSPLMGGFGLKHPPPQILIKNTPVPANPSTTFSAAKFASFITQYSTGQVSVEIEWELQKENSKRWNPEIQYTSNYNKSVNVDFTVDTNGVYSEPRPIGTRYLTRNL

SEQ ID NO: 4052 - protein, 735 aa, synthetic construct
  REGION 1..735: note = source = /note="Description of Artificial Sequence: Synthetic polypeptide"
MAADGYLPDWLEDTLSEGIRQWWKLKPGPPPPKPAERHKDASRGLVLPGYKYLGPFNGLDKGEPVNEADAAALEHDKAYDRQLDSGDNPYLKYNHADAEFQERLKEDTSFGGNLGRAVFQAKKRVLEPLGLVEEPVKTAPGKKRPVEHSPVEPDSSSGTGKAGQQPARKRLNFGQTGDADSVPDPQPLGQPPAAPSGLGTNTMATGSGAPMADNNEGADGVGNSSGNWHCDSTWMGDRVITTSTRTWALPTYNNHLYKQISSQSGASNDNHYFGYSTPWGYFDFNRFHCHFSPRDWQRLINNNWGFRPKRLNFKLFNIQVKEVTQNDGTTTIANNLTSTVQVFTDSEYQLPYVLGSAHQGCLPPFPADVFMVPQYGYLTLNNGSQAVGRSSFYCLEYFPSQMLRTGNNFTFSYTFEDVPFHSSYAHSQSLDRLMNPLIDQYLYYLSRTNTPSGTTTQSRLQFSQAGASDIRDQSRNWLPGPCYRQQRVSKTSADNNNSEYSWTGATKYHLNGRDSLVNPGPAMASHKDDEEKFFPQSGVLIFGKQGSEKTNVDIEKVMITDEEEIRTTNPVATEQYGSVSTNLQRGNRQAATADVNTQGVLPGMVWQDRDVYLQGPIWAKIPHTDGHFHPSPLMGGFGLKHPPPQILIKNTPVPANPSTTFSAAKFASFITQYSTGQASVEIEWELQKENSKRWNPEIQYTSNYNKSVNVDFTVDTNGVYSEPRPIGTRYLTRNL

SEQ ID NO: 4053 - protein, 735 aa, synthetic construct
  REGION 1..735: note = source = /note="Description of Artificial Sequence: Synthetic polypeptide"
MAADGYLPDWLEDTLSEGIRQWWKLKPGPPPPKPAERHKDDSRGLVLPGYKYLGPFNGLDKGEPVNEADAAALEHDKAYDRQLDSGDNPYLKYNHADAEFQERLKEDTSFGGNLGRAVFQAKKRVLEPLGLVEEPVKTAPGKKRPVEHSPVEPDSSSGTGKAGQQPARKRLNFGQTGDADSVPDPQPLGQPPAAPTSLGSTTMATGSGAPMADNNEGADGVGNSSGNWHCDSTWMGDRVITTSTRTWALPTYNNHLYKQISSQSGASNDNHYFGYSTPWGYFDFNRFHCHFSPRDWQRLINNNWGFRPKRLNFKLFNIQVKEVTQNDGTTTIANNLTSTVQVFTDSEYQLPYVLGSAHQGCLPPFPADVFMVPQYGYLTLNNGSQAVGRSSFYCLEYFPSQMLRTGNNFTFSYTFEDVPFHSSYAHSQSLDRLMNPLIDQYLYYLSRTNTPSGTTTQSRLQFSQAGASDIRDQSRNWLPGPCYRQQRVSKTSADNNNSEYSWTGATKYHLNGRDSLVNPGPAMASHKDDEEKFFPQSGVLIFGKQGSEKTNVDIEKVMITDEEEIRTTNPVATEQYGSVSTNLQRGNRQAATADVNTQGVLPGMVWQDRDVYLQGPIWAKIPHTDGHFHPSPLMGGFGLKHPPPQILIKNTPVPANPSTTFSAAKFASFITQYSTGQASVEIEWELQKENSKRWNPEIQYTSNYNKSVNVDFTVDTNGVYSEPRPIGTRYLTRNL

SEQ ID NO: 4054 - protein, 735 aa, synthetic construct
  REGION 1..735: note = source = /note="Description of Artificial Sequence: Synthetic polypeptide"
MAADGYLPDWLEDTLSEGIRQWWKLKPGPPPPKPAERHKDASRGLVLPGYKYLGPFNGLDKGEPVNEADAAALEHDKAYDRQLDSGDNPYLKYNHADAEFQERLKEDTSFGGNLGRAVFQAKKRVLEPLGLVEEPVKTAPGKKRPVEHSPVEPDSSSGTGKAGQQPARKRLNFGQTGDADSVPDPQPLGQPPAAPSGLGTNTMATGSGAPMADNNEGADGVGNSSGNWHCDSTWMGDRVITTSTRTWALPTYNNHLYKQISSQSGASNDNHYFGYSTPWGYFDFNRFHCHFSPRDWQRLINNNWGFRPKRLNFKLFNIQVKEVTQNDGTTTIANNLTSTVQVFTDSEYQLPYVLGSAHQGCLPPFPADVFMVPQYGYLTLNNGSQAVGRSSFYCLEYFPSQMLRTGNNFTFSYTFEDVPFHSSYAHSQSLDRLMNPLIDQYLYYLSRTNTPSGTTTQSRLQFSQAGASDIRDQSRNWLPGPCYRQQRVSKTSADNNNSEYSWTGATKYHLNGRDSLVNPGPAMASHKDDEEKFFPQSGVLIFGKQGSEKTNVDIEKVMITDEEEIRTTNPVATEQYGSVSTNLQRGNRQAATADVNTQGVLPGMVWQDRDVYLQGPIWAKIPHTDGHFHPSPLMGGFGLKHPPPQILIKNTPVPANPSTTFSAAKFASFITQYSTGQVSVEIEWELQKENSKRWNPEIQYTSNYNKSVNVDFTVDTNGVYSEPRPIGTRYLTRNL

SEQ ID NO: 4055 - protein, 735 aa, synthetic construct
  REGION 1..735: note = source = /note="Description of Artificial Sequence: Synthetic polypeptide"
MAADGYLPDWLEDTLSEGIRQWWKLKPGPPPPKPAERHKDASRGLVLPGYKYLGPFNGLDKGEPVNEADAAALEHDKAYDRQLDSGDNPYLKYNHADAEFQERLKEDTPFGGNLGRAVFQAKKRVLEPLGLVEEPVKTAPGKKRPVEHSPVEPDSSSGTGKAGQRPARKRLNFGQTGDADSVPDPQPLGQPPAAPTSLGSTTMATGSGAPMADNNEGADGVGNSSGNWHCDSQWLGDRVITTSTRTWALPTYNNHLYKQIPSQSGASNDNHYFGYSTPWGYFDFNRFHCHFSPRDWQRLINNNWGFRPKRLNFKLFNIQVKEVTQNDGTTTIANNLTSTVQVFTDSEYQLPYVLGSAHQGCLPPFPADVFMVPQYGYLTLNNGSQAVGRSSFYCLEYFPSQMLRTGNNFTFSYTFEDVPFHSSYAHSQSLDRLMNPLIDQYLYYLSRTNTPSGTTTQSRLQFSQAGASDIRDQSRNWLPGPCYRQQRVSKTSADNNNSEYSWTGATKYHLNGRDSLVNPGPAMASHKDDEEKFFPQSGVLIFGKQGSEKTNVDIEKVMITDEEEIRTTNPVATEQYGSVSTNLQRGNRQAATADVNTQGVLPGMVWQDRDVYLQGPIWAKIPHTDGHFHPSPLMGGFGLKHPPPQILIKNTPVPANPSTTFSAAKFASFITQYSTGQASVEIEWELQKENSKRWNPEIQYTSNYNKSVNVDFTVDTNGVYSEPRPIGTRYLTRNL

SEQ ID NO: 4056 - protein, 735 aa, synthetic construct
  REGION 1..735: note = source = /note="Description of Artificial Sequence: Synthetic polypeptide"
MAADGYLPDWLEDTLSEGIRQWWKLKPGPPPPKPAERHKDDSRGLVLPGYKYLGPFNGLDKGEPVNEADAAALEHDKAYDRQLDSGDNPYLKYNHADAEFQERLKEDTSFGGNLGRAVFQAKKRVLEPLGLVEEPVKTAPGKKRPVEHSPVEPDSSSGTGKAGQQPARKRLNFGQTGDADSVPDPQPLGQPPAAPTSLGSTTMATGSGAPMADNNEGADGVGNSSGNWHCDSTWMGDRVITTSTRTWALPTYNNHLYKQISSQSGASNDNHYFGYSTPWGYFDFNRFHCHFSPRDWQRLINNNWGFRPKRLNFKLFNIQVKEVTQNDGTTTIANNLTSTVQVFTDSEYQLPYVLGSAHQGCLPPFPADVFMVPQYGYLTLNNGSQAVGRSSFYCLEYFPSQMLRTGNNFTFSYTFEDVPFHSSYAHSQSLDRLMNPLTDQYLYYLSRTNTPSGTTTQSRLQFSQAGASDIRDQSRNWLPGPCYRQQRVSKTSADNNNSEYSWTGATKYHLNGRDSLVNPGPAMASHKDDEEKFFPQSGVLIFGKQGSEKTNVDIEKVMITDEEEIRTTNPVATEQYGSVSTNLQRGNRQAATADVNTQGVLPGMVWQDRDVYLQGPIWAKIPHTDGHFHPSPLMGGFGLKHPPPQILIKNTPVPANPSTTFSAAKFASFITQYSTGQVSVEIEWELQKENSKRWNPEIQYTSNYNKSVNVDFTVDTNGVYSEPRPIGTRYLTRNL

SEQ ID NO: 4057 - protein, 735 aa, synthetic construct
  REGION 1..735: note = source = /note="Description of Artificial Sequence: Synthetic polypeptide"
MAADGYLPDWLEDTLSEGIRQWWKLKPGPPPPKPAERHKDDSRGLVLPGYKYLGPFNGLDKGEPVNEADAAALEHDKAYDRQLDSGDNPYLKYNHADAEFQERLKEDTSFGGNLGRAVFQAKKRVLEPLGLVEEPVKTAPGKKRPVEHSPVEPDSSSGTGKAGQQPARKRLNFGQTGDADSVPDPQPLGQPPAAPSGLGTNTMATGSGAPMADNNEGADGVGNSSGNWHCDSTWMGDRVITTSTRTWALPTYNNHLYKQISSQSGASNDNHYFGYSTPWGYFDFNRFHCHFSPRDWQRLINNNWGFRPKRLNFKLFNIQVKEVTQNDGTTTIANNLTSTVQVFTDSEYQLPYVLGSAHQGCLPPFPADVFMVPQYGYLTLNNGSQAVGRSSFYCLEYFPSQMLRTGNNFTFSYTFEDVPFHSSYAHSQSLDRLMNPLIDQYLYYLSRTNTPSGTTAQSRLQFSQAGASDIRDQSRNWLPGPCYRQQRVSKTSADNNNSEYSWTGATKYHLNGRDSLVNPGPAMASHKDDEEKFFPQSGVLIFGKQGSEKTNVDIEKVMITDEEEIRTTNPVATEQYGSVSTNLQRGNRQAATADVNTQGVLPGMVWQDRDVYLQGPIWAKIPHTDGHFHPSPLMGGFGLKHPPPQILIKNTPVPANPSTTFSAAKFASFITQYSTGQVSVEIEWELQKENSKRWNPEIQYTSNYNKSVNVDFTVDTNGVYSEPRPIGTRYLTRNL

SEQ ID NO: 4058 - protein, 735 aa, synthetic construct
  REGION 1..735: note = source = /note="Description of Artificial Sequence: Synthetic polypeptide"
MAADGYLPDWLEDTLSEGIRQWWKLKPGPPPPKPAERHKDDSRGLVLPGYKYLGPFNGLDKGEPVNEADAAALEHDKAYDRQLDSGDNPYLKYNHADAEFQERLKEDTSFGGNLGRAVFQAKKRVLEPLGLVEEPVKTAPGKKRPVEHSPVEPDSSSGTGKAGQQPARKRLNFGQTGDADSVPDPQPLGQPPAAPSGLGTNTMATGSGAPMADNNEGADGVGNSSGNWHCDSTWMGDRVITTSTRTWALPTYNNHLYKQISSQSGASNGNHYFGYSTPWGYFDFNRFHCHFSPRDWQRLINNNWGFRPKRLNFKLFNIQVKEVTQNDGTTTIANNLTSTVQVFTDSEYQLPYVLGSAHQGCLPPFPADVFMVPQYGYLTLNNGSQAVGRSSFYCLEYFPSQMLRTGNNFTFSYTFEDVPFHSSYAHSQSLDRLMNPLIDQYLYYLSRTNTPSGTTTQSRLQFSQAGASDIRDQSRNWLPGPCYRQQRVSKTSADNNNSEYSWTGATKYHLNGRDSLVNPGPAMASHKDDEEKFFPQSGVLIFGKQGSEKTNVDIEKVMITDEEEIRTTNPVATEQYGSVSTNLQRGNRQAATADVNTQGVLPGMVWQDRDVYLQGPIWAKIPHTDGHFHPSPLMGGFGLKHPPPQILIKNTPVPANPSTTFSAAKFASFITQYSTGQVSVEIEWELQKENSKRWNPEIQYTSNYNKSVNVDFTVDTNGVYSEPRPIGTRYLTRNL

SEQ ID NO: 4059 - protein, 735 aa, synthetic construct
  REGION 1..735: note = source = /note="Description of Artificial Sequence: Synthetic polypeptide"
MAADGYLPDWLEDTLSEGIRQWWKLKPGPPPPKPAERHKDDSRGLVLPGYKYLGPFNGLDKGEPVNEADAAALEHDKAYDRQLDSGDNPYLKYNHADAEFQERLKEDTSFGGNLGRAVFQAKKRVLEPLGLVEEPVKTAPGKKRPVEHSPVEPDSSSGTGKAGQQPARKRLNFGQTGDADSVPDPQPLGQPPAAPSGLGTNTMATGSGAPMADNNEGADGVGNSSGNWHCDSTWMGDRVITTSTRTWALPTYNNHLYKQISSQSGASNDNHYFGYSTPWGYFDFNRFHCHFSPRDWQRLINNNWGFRPKRLNFKLFNIQVKEVTQNDGTTTIANNLTSTVQVFTDSEYQLPYVLGSAHQGCLPPFPADVFMVPQYGYLTLNNGSQAVGRSSFYCLEYFPSQMLRTGNNFTFSYTFEDVPFHSSYAHSQSLDRLMNPLIDQYLYYLSRTNTPSGTTTQSRLQFSQAGASDIRDQSRNWLPGPCYRQQRVSKTSADNNNSEYSWTGATKYHLNGRDSLVNPGPAMASHKDDEEKFFPQSGVLIFGKQGSEKTNVDIERVMITDEEEIRTTNPVATEQYGSVSTNLQRGNRQAATADVNTQGVLPGMVWQDRDVYLQGPIWAKIPHTDGHFHPSPLMGGFGLKHPPPQILIKNTPVPANPSTTFSAAKFASFITQYSTGQVSVEIEWELQKENSKRWNPEIQYTSNYNKSVNVDFTVDTNGVYSEPRPIGTRYLTRNL

SEQ ID NO: 4060 - protein, 735 aa, synthetic construct
  REGION 1..735: note = source = /note="Description of Artificial Sequence: Synthetic polypeptide"
MAADGYLPDWLEDTLSEGIRQWWKLKPGPPPPKPAERHKDDSRGLVLPGYKYLGPFNGLDKGEPVNEADAAALEHDKAYDRQLDSGDNPYLKYNHADAEFQERLKEDTSFGGNLGRAVFQAKKRVLEPLGLVEEPVKTAPGKKRPVEHSPVEPDSSSGTGKAGQQPARKRLNFGQTGDADSVPDPQPLGQPPAAPSGLGTNTMATGSGAPMADNNEGADGVGNSSGNWHCDSTWMGDRVITTSTRTWALPTYNNHLYKQISSQSGASNDNHCFGYSTPWGYFDFNRFHCHFSPRDWQRLINNNWGFRPKRLNFKLFNIQVKEVTQNDGTTTIANNLTSTVQVFTDSEYQLPYVLGSAHQGCLPPFPADVFMVPQYGYLTLNNGSQAVGRSSFYCLEYFPSQMLRTGNNFTFSYTFEDVPFHSSYAHSQSLDRLMNPLIDQYLYYLSRTNTPSGTTTQSRLQFSQAGASDIRDQSRNWLPGPCYRQQRVSKTSADNNNSEYSWTGATKYHLNGRDSLVNPGPAMASHKDDEEKFFPQSGVLIFGKQGSEKTNVDIEKVMITDEEEIRTTNPVATEQYGSVSTNLQRGNRQAATADVNTQGVLPGMVWQDRDVYLQGPIWAKIPHTDGHFHPSPLMGGFGLKHPPPQILIKNTPVPANPSTTFSAAKFASFITQYSTGQVSVEIEWELQKENSKRWNPEIQYTSNYNKSVNVDFTVDTNGVYSEPRPIGTRYLTRNL

SEQ ID NO: 4061 - protein, 735 aa, synthetic construct
  REGION 1..735: note = source = /note="Description of Artificial Sequence: Synthetic polypeptide"
MAADGYLPDWLEDTLSEGIRQWWKLKPGPPPPKPAERHKDDSRGLVLPGYKYLGPFNGLDKGEPVNEADAAALEHDKAYDRQLDSGDNPYLKYNHADAEFQERLKEDTSFGGNLGRAVFQAKKRVLEPLGLVEEPVKTAPGKKRPVEHSPVEPDSSSGTGKAGQQPARKRLNFGQTGDADSVPDPQPLGQPPAAPSGLGTNTMATGSGAPMADNNEGADGVGNSSGNWHCDSTWMGDRVITTSTRTWALPTYNNHLYKQISSQSGASNDNHYFGYSTPWGYFDFNRFHCHFSPRDWQRLINNNWGFRPKRLNFKLFNIQVKEVTQNDGTTTIANNLTSTVQVFTDSEYQLPYVLGSAHQGCLPPFPADVFMVPQYGYLTLNNGSQAVGRSSFYCLEYFPSQMLRTGNNFTFSYTFEDVPFHSSYAHSQSLDRLMNPLIDQYLYYLSRTNTPSGTTTQSRLQFSQAGASDIRDQSRNWLPGPCYRQQRVSKTSADNNNSEYSWTGATKYHLNGRDSLVNPGPAMASHKDDEEKFFPQSGVLIFGKQGSEKTNVDIEKVMITDEEEIRTTNPVATEQYGSVSTNLQRGNRQAATADVNTQGVLPGMVWQDRDVYLQGPIWAKIPHTDGHFHPSPLMGGFGLKHPPPQILIKNTPVPANPSTTFSAAKFASFITQYSTGQVSVEIEWELQKENSKRWNPEIQYTSNYNKSVNADFTVDTNGVYSEPRPIGTRYLTRNL

SEQ ID NO: 4062 - protein, 735 aa, synthetic construct
  REGION 1..735: note = source = /note="Description of Artificial Sequence: Synthetic polypeptide"
MAADGYLPDWLEDTLSEGIRQWWKLKPGPPPPKPAERHRDDSRGLVLPGYKYLGPFNGLDKGEPVNEADAAALEHDKAYDRQLDSGDNPYLKYNHADAEFQERLKEDTSFGGNLGRAVFQAKKRVLEPLGLVEEPVKTAPGKKRPVEHSPVEPDSSSGTGKAGQQPARKRLNFGQTGDADSVPDPQPLGQPPAAPSGLGTNTMATGSGAPMADNNEGADGVGNSSGNWHCDSTWMGDRVITTSTRTWALPTYNNHLYKQISSQSGASNGNHYFGYSTPWGYFDFNRFHCHFSPRDWQRLINNNWGFRPKRLNFKLFNIQVKEVTQNDGTTTIANNLTSTVQVFTDSEYQLPYVLGSAHQGCLPPFPADVFMVPQYGYLTLNNGSQAVGRSSFYCLEYFPSQMLRTGNNFTFSYTFEDVPFHSSYAHSQSLDRLMNPLIDQYLYYLSRTNTPSGTTTQSRLQFSQAGASDIRDQSRNWLPGPCYRQQRVSKTSADNNNSEYSWTGATKYHLNGRDSLVNPGPAMASHKDDEEKFFPQSGVLIFGKQGSEKTNVDIEKVMITDEEEIRTTNPVATEQYGSVSTNLQRGNRQAATADVNTQGVLPGMVWQDRDVYLQGPIWAKIPHTDGHFHPSPLMGGFGLKHPPPQILIKNTPVPANPSTTFSAAKFASFITQYSTGQVSVEIEWELQKENSKRWNPEIQYTSNYNKSVNVDFTVDTNGVYSEPRPIGTRYLTRNL

SEQ ID NO: 4063 - protein, 735 aa, synthetic construct
  REGION 1..735: note = source = /note="Description of Artificial Sequence: Synthetic polypeptide"
MAADGYLPDWLEDTLSEGIRQWWKLKPGPPPPKPAERHKDDSRGLVLPGYKYLGPFNGLDKGEPVNEADAAALEHDKAYDRQLDSGDNPYLKYNHADAEFQERLKEDTSFGGNLGRAVFQAKKRVLEPLGLVEEPVKTAPGKKRPVEHSPVEPDSSSGTGKAGQQPARKRLNFGQTGDADSVPDPQPLGQPPAAPSGLGTNTMATGSGAPMADNNEGADGVGNSSGNWHCDSTWMGDRVITTSTRTWALPTYNNHLYKQISSQSGASNDNHYFGYSTPWGYFDFNRFHCHFSPRDWQRLINNNWGFRPKRLNFKLFNIQVKEVTQNDGTTTIANNLTSTVQVFTDSEYQLPYVLGSAHQGCLPPFPADVFMVPQYGYLTLNNGSRAVGRSSFYCLEYFPSQMLRTGNNFTFSYTFEDVPFHSSYAHSQSLDRLMNPLIDQYLYYLSRTNTPSGTTTQSRLQFSQAGASDIRDQSRNWLPGPCYRQQRVSKASADNNNSEYSWTGATKYHLNGRDSLVNPGPAMASHKDDEEKFFPQSGVLIFGKQGSEKTNVDIEKVMITDEEEIRTTNPVATEQYGSVSTNLQRGNRQAATADVNTQGVLPGMVWQDRDVYLQGPIWAKIPHTDGHFHPSPLMGGFGLKHPPPQILIKNTPVPANPSTTFSAAKFASFITQYSTGQVSVEIEWELQKENSKRWNPEIQYTSNYNKSVNVDFTVDTNGVYSEPRPIGTRYLTRNL

SEQ ID NO: 4064 - protein, 735 aa, synthetic construct
  REGION 1..735: note = source = /note="Description of Artificial Sequence: Synthetic polypeptide"
MAADGYLPDWLEDTLSEGIRQWWKLKPGPPPPKPAERHRDDSRGLVLPGYKYLGPFNGLDKGEPVNEADAAALEHDKAYDRQLDSGDNPYLKYNHADAEFQERLKEDTSFGGNLGRAVFQAKKRVLEPLGLVEEPVKTAPGKKRPVEHSPVEPDSSSGTGKAGQQPARKRLNFGQTGDADSVPDPQPLGQPPAAPSGLGTNTMATGSGAPMADNNEGADGVGNSSGNWHCDSTWMGDRVITTSTRTWALPTYNNHLYKQISSQSGASNGNHYFGYSTPWGYFDFNRFHCHFSPRDWQRLINNNWGFRPKRLNFKLFNIQVKEVTQNDGTTTIANNLTSTVQVFTDSEYQLPYVLGSAHQGCLPPFPADVFMVPQYGYLTLNNGSQAVGRSSFYCLEYFPSQMLRTGNNFTFSYTFEDVPFHSSYAHSQSLDRLMNPLIDQYLYYLSRTNTPSGTTTQSRLQFSQAGASGIRDQSRNWLPGPCYRQQRVSKTSADNNNSEYSWTGATKYHLNGRDSLVNPGPAMASHKDDEEKFFPQSGVLIFGKQGSEKTNVDIEKVMITDEEEIRTTNPVATEQYGSVSTNLQRGNRQAATADVNTQGVLPGMVWQDRDVYLQGPIWAKIPHTDGHFHPSPLMGGFGLKHPPPQILIKNTPVPANPSTTFSAAKFASFITQYSTGQVSVEIEWELQKENSKRWNPEIQYTSNYNKSVNVDFTVDTNGVYSEPRPIGTRYLTRNL

SEQ ID NO: 4065 - protein, 735 aa, synthetic construct
  REGION 1..735: note = source = /note="Description of Artificial Sequence: Synthetic polypeptide"
MAADGYLPDWLEDTLSEGIRQWWKLKPGPPPPKPAERHRDDSRGLVLPGYKYLGPFNGLDKGEPVNEADAAALEHDKAYDRQLDSGDNPYLKYNHADAEFQERLKEDTSFGGNLGRAVFQAKKRVLEPLGLVEEPVKTAPGKKRPVEHSPVEPDSSSGTGKAGQQPARKRLNFGQTGDADSVPDPQPLGQPPAAPSGLGTNTMATGSGAPMADNNEGADGVGNSSGNWHCDSTWMGDRVITTSTRTWALPTYNNHLYKQISSQSGASNGNHYFGYSTPWGYFDFNRFHCHFSPRDWQRLINNNWGFRPKRLNFKLFNIQVKEVTQNDGTTTIANNLTSTVQVFTDSEYQLPYVLGSAHQGCLPPFPADVFMVPQYGYLTLNNGSQAVGRSSFYCLEYFPSQMLRTGNNFTFSYTFEDVPFHSNYAHSQSLDRLMNPLIDQYLYYLSRTNTPSGTTTQSRLQFSQAGASDIRDQSRNWLPGPCYRQQRVSKTSADNNNSEYSWTGATKYHLNGRDSLVNPGPAMASHKDDEEKFFPQSGVLIFGKQGSEKTNVDIEKVMITDEEEIRTTNPVATEQYGSVSTNLQRGNRQAATADVNTQGVLPGMVWQDRDVYLQGPIWAKIPHTDGHFHPSPLMGGFGLKHPPPQILIKNTPVPANPSTTFSAAKFASFITQYSTGQVSVEIEWELQKENSKRWNPEIQYTSNYNKSVNVDFTVDTNGVYSEPRPIGTRYLTRNL

SEQ ID NO: 4066 - protein, 735 aa, synthetic construct
  REGION 1..735: note = source = /note="Description of Artificial Sequence: Synthetic polypeptide"
MAADGYLPDWLEDTLSEGIRQWWKLKPGPPPPKPAERHKDDSRGLVLPGYKYLGPFNGLDKGEPVNEADAAALEHDKAYDRQLDSGDNPYLKYNHADAEFQERLKEDTSFGGNLGRAVFQAKKRVLEPLGLVEEPVKTAPGKKRPVEHSPVEPDSSSGTGKAGQQPARKRLNFGQTGDADSVPDPQPLGQPPAAPSGLGTNTMATGSGAPMADNNEGADGVGNSSGNWHCDSTWMGDRVITTSTRTWALPTYNNHLYKQISSQSGASNDNHYFGYSTPWGYFDFNRFHCHFSPRDWQRLINNNWGFRPKRLNFKLFNIQVKEVTQNDGTTTIANNLTSTVQVFTDSEYQLPYVLGSAHQGCLPPFPADVFMVPQYGYLTLNNGSQAVGRSSFYCLEYFPSQMLRTGNNFTFSYTFEDVPFHSSYAHSQSLDRLMNPLIDQYLYYLSRTNTPSGTTTQSRLQFSQAGASDIRDQSRNWLPGPCYRQQRVSKTSADNNNSEYSWTGATKYHLNGRDSLVNPGPAMASHKDDEEKFFPQSGVLIFGKQGSEKTNVDIEKVMITDEEEIRTTNPVATEQYGSVSTNLQRGNRQAATADVNTQGVLPGMVWQDRDVYLQGPIWAKIPHTDGHFHPSPLMGGFGLKHPPPQILIKNTPVPANPSTTFSAAKFASFITQYSAGQVSVEIEWELQKENSKRWNPEIQYTSNYNKSVNVDFTVDTNGVYSEPRPIGTRYLTRNL

SEQ ID NO: 4067 - protein, 735 aa, synthetic construct
  REGION 1..735: note = source = /note="Description of Artificial Sequence: Synthetic polypeptide"
MAADGYLPDWLEDTLSEGIRQWWKLKPGPPPPKPAERHKDDSRGLVLPGYKYLGPFNGLDKGEPVNEADAAALEHDKAYDRQLDSGDNPYLKYNHADAEFQERLKEDTSFGGNLGRAVFQAKKRVLEPLGLVEEPVKTAPGKKRPVEHSPVEPDSSSGTGKAGQQPARKRLNFGQTGDADSVPDPQPLGQPPAAPSGLGTNTMATGSGAPMADNNEGADGVGNSSGNWHCDSTWMGDRVITTSTRTWALPTYNNHLYKQISSQSGASNDNHYFGYSTPWGYFDFNRFHCHFSPRDWQRLINNNWGFRPKRLNFKLFNIQVKEVTQNDGTTTIANNLTSTVQVFTDSEYQLPYVLGSAHQGCLPPFPADVFMVPQYGYLTLNNGSQAVGRSSFYCLEYFPSQMLRTGNNFTFSYTFEDVPFHSSYAHSQSLDRLMNPLIDQYLYYLSRTNTPSGTTTQSRLQFSQAGASDIRDQSRNWLPGPCYRQQRVSKTSADNNNSEYSWTGATKYHLNGRDSLVNPGPAMASHKDDEEKFFPQSGVLIFGKQGSEKTNVDIEKVMITDEEEIRTTNPVATEQYGSVSTNLQRGNRQAATADVNTQGVLPGMVWQDRDVYLQGPIWAKIPHTDGHFHPSPLMGGFGLKHPPPQILIKNTPVPANPSTTFSAAKFASFITQYSTGQVSVEIEWELQKENSKRWNPEIQYTSNYNKSVNVDFTVDTDGVYSEPRPIGTRYLTRNL

SEQ ID NO: 4068 - protein, 735 aa, synthetic construct
  REGION 1..735: note = source = /note="Description of Artificial Sequence: Synthetic polypeptide"
MAADGYLPDWLEDTLSEGIRQWWKLKPGPPPPKPAERHKDDSRGLVLPGYKYLGPFNGLDKGEPVNEADAAALEHDKAYDRQLDSGDNPYLKYNHADAEFQERLKEDTSFGGNLGRAVFQAKKRVLEPLGLVEEPVKTAPGKKRPVEHSPVEPDSSSGTGKAGQQPARKRLNFGQTGDADSVPDPQPLGQPPAAPSGLGTNTMATGSGAPMADNNEGADGVGNSSGNWHCDSTWMGDRVITTSTRTWALPTYNNHLYKQISSQSGASNDNHYFGYSTPWGYFDFNRFHCHFSPRDWQRLINNNWGFRPKRLNFKLFNIQVKEVTQNDGTTTIANNLTSTVQVFTDSEYQLPYVLGSAHQGCLPPFPADVFMVPQYGYLTLNNGSQAVGRSSFYCLEYFPSQMLRTGNNFTFSYTFEDVPFHSSYAHSQSLDRLMNPLIDQYLYYLSRTNTPSGTTTQSRLQFSQAGASDIRDQSRNWLPGPCYRQQRVSKTSADNNNSEYSWTGATKYHLNGRDSLVNPGPAMASHKDDEEKFFPQSGVLIFGKQGSEKTNVDIEKVMITDEEEIRTTNPVATEQYGSVSTNLQRGNRQAATADVNTQGVLPGMVWQGRDVYLQGPIWAKIPHTDGHFHPSPLMGGFGLKHPPPQILIKNTPVPANPSTTFSAAKFASFITQYSTGQVSVEIEWELQKENSKRWNPEIQYTSNYNKSVNVDFTVDTNGVYSEPRPIGTRYLTRNL

SEQ ID NO: 4069 - protein, 735 aa, synthetic construct
  REGION 1..735: note = source = /note="Description of Artificial Sequence: Synthetic polypeptide"
MAADGYLPDWLEDTLSEGIRQWWKLKPGPPPPKPAERHKDDSRGLVLPGYKYLGPFNGLDKGEPVNEADAAALEHDKAYDRQLDSGDNPYLKYNHADAEFQERLKEDTSFGGNLGRAVFQAKKRVLEPLGLVEEPVKTAPGKKGPVEHSPVEPDSSSGTGKAGQQPARKRLNFGQTGDADSVPDPQPLGQPPAAPSGLGTNTMATGSGAPMADNNEGADGVGNSSGNWHCDSTWMGDRVITTSTRTWALPTYNNHLYKQISSQSGASNDNHYFGYSTPWGYFDFNRFHCHFSPRDWQRLINNNWGFRPKRLNFKLFNIQVKEVTQNDGTTTIANNLTSTVQVFTDSEYQLPYVLGSAHQGCLPPFPADVFMVPQYGYLTLNNGSQAVGRSSFYCLEYFPSQMLRTGNNFTFSYTFEDVPFHSSYAHSQSLDRLMNPLIDQYLYYLSRTNTPSGTTTQSRLQFSQAGASDIRDQSRNWLPGPCYRQQRVSKTSADNNNSEYSWTGATKYHLNGRDSLVNPGPAMAGHKDDEEKFFPQSGVLIFGKQGSEKTNVDIEKVMITDEEEIRTTNPVATEQYGSVSTNLQRGNRQAATADVNTQGVLPGMVWQDRDVYLQGPIWAKIPHTDGHFHPSPLMGGFGLKHPPPQILIKNTPVPANPSTTFSAAKFASFITQYSTGQVSVEIEWELQKENSKRWNPEIQYTSNYNKSVNVDFTVDTNGVYSEPRPIGTRYLTRNL

SEQ ID NO: 4070 - protein, 735 aa, synthetic construct
  REGION 1..735: note = source = /note="Description of Artificial Sequence: Synthetic polypeptide"
MAADGYLPDWLEDTLSEGIRQWWKLKPGPPPPKPAERHKDDSRGLVLPGYKYLGPFNGLDKGEPVNEADAAALEHDKAYDRQLDSGDNPYLKYNHADAEFQERLKEDTSFGGNLGRAVFQAKKRVLEPLGLVEEPVKTAPGKKRLVEHSPVEPDSSSGTGKAGQQPARKRLNFGQTGDADSVPDPQPLGQPPAAPSGLGTNTMATGSGAPMADNNEGADGVGNSSGNWHCDSTWMGDRVITTSTRTWALPTYNNHLYKQISSQSGASNDNHYFGYSTPWGYFDFNRFHCHFSPRDWQRLINNNWGFRPKRLNFKLFNIQVKEVTQNDGTTTIANNLTSTVQVFTDSEYQLPYVLGSAHQGCLPPFPADVFMVPQYGYLTLNNGSQAVGRSSFYCLEYFPSQMLRTGNNFTFSYTFEDVPFHSSYAHSQSLDRLMNPLIDQYLYYLSRTNTPSGTTTQSRLQFSQAGASDIRDQSRNWLPGPCYRQQRVSKTSADNNNSEYSWTGATKYHLNGRDSLVNPGPAMASHKDDEEKFFPQSGVLIFGKQGSEKTNVDIEKVMITDEEEIRTTNPVATEQYGSVSTNLQRGNRQAATADVNTQGVLPGMVWQDRDVYLQGPIWAKIPHTDGHFHPSPLMGGFGLKHPPPQILIKNTPVPANPSTTFSAAKFASFITQYSTGQVSVEIEWELQKENSKRWNPEIQYTSNYNKSVNVDFTVDTNGVYSEPRPIGTRYLTRNL

SEQ ID NO: 4071 - protein, 735 aa, synthetic construct
  REGION 1..735: note = source = /note="Description of Artificial Sequence: Synthetic polypeptide"
MAADGYLPDWLEDTLSEGIRQWWKLKPGPPPPKPAERHKDDSRGLVLPGYKYLGPFNGLDKGEPVNEAGAAALKHDKAYDRQLDSGDNPYLKYNHADAEFQERLKEDTSFGGNLGRAVFQAKKRVLEPLGLVEEPVKTAPGKKRPVEHSPVEPDSSSGTGKAGQQPARKRLNFGQTGDADSVPDPQPLGQPPAAPSGLGTNTMATGSGAPMADNNEGADGVGNSSGNWHCDSTWMGDRVITTSTRTWALPTYNNHLYKQISSQSGASNDNHYFGYSTPWGYFDFNRFHCHFSPRDWQRLINNNWGFRPKRLNFKLFNIQVKEVTQNDGTTTIANNLTSTVQVFTDSEYQLPYVLGSAHQGCLPPFPADVFMVPQYGYLTLNNGSQAVGRSSFYCLEYFPSQMLRTGNNFTFSYTFEDVPFHSSYAHSQSLDRLMNPLIDQYLYYLSRTNTPSGTTTQSRLQFSQAGASDIRDQSRNWLPGPCYRQQRVSKTSADNNNSEYSWTGATKYHLNGRDSLVNPGPAMASHKDDEEKFFPQSGVLIFGKQGSEKTNVDIEKVMITDEEEIRTTNPVATEQYGSVSTNLQRGNRQAATADVNTQGVLPGMVWQDRDVYLQGPIWAKIPHTDGHFHPSPLMGGFGLKHPPPQILIKNTPVPANPSTTFSAAKFASFITQYSTGQVSVEIEWELQKENSKRWNPEIQYTSNYNKSVNVDFTVDTNGVYSEPRPIGTRYLTRNL

SEQ ID NO: 4072 - protein, 735 aa, synthetic construct
  REGION 1..735: note = source = /note="Description of Artificial Sequence: Synthetic polypeptide"
MAADGYLPDWLEDTLSEGIRQWWKLKPGPPPPKPAERHKDDSRGLVLPGYKYLGPFNGLDKGEPVNEADAAALEHDKAYDRQLDSGDNPYLKYNHADAEFQERLKEDTSFGGNLGRAVFQAKKRVLEPLGLVEEPVKTAPGKKRPVEHSPVEPDSSSGTGKAGQQPARKRLNFGQTGDADSVPDPQPLGQPPAAPSGLGTNTMATGSGAPMADNNEGADGVGNSSGNWHCDSTWMGDRVITTSTRTWALPTYNNHLYKQISSQSGASNDNHYFGYSTPWGYFDFNRFHCHFSPRDWQRLINNNWGFRPKRLNFKLFNIQVKEVTQNDGTTTIANNLTSTVQVFTDSEYQLPYVLGSAHQGCLPPFPADVFMVPQYGYLTLNNGSQAVGRSSFYCLEYFPSQMLRTGNNFTFSYTFEDVPFHSSYAHSQSLDRLMNPLIDQYLYYLSRTNTPSGTTTQSRLQFSQAGASGIRDQSRNWLPGPCYRQQRVSKTSADNNNSEYSWTGATKYHLNGRDSLVNPGPAMASHKDDEEKFFPQSGVLIFGKQGSEKTNVDIEKVMITDEEEIRTTNPVATEQYGSVSTNLQRGNRQAATADVNTQGVLPGMVWQDRDVYLQGPIWAKIPHTDGHFHPSPLMGGFGLKHPPPQILIKNTPVPANPSTTFSAAKFASFITQYSTGQVSVEIEWELQKENSKRWNPEIQYTSNYNKSVNVDFTVDTNGVYSEPRPIGTRYLTRNL

SEQ ID NO: 4073 - protein, 735 aa, synthetic construct
  REGION 1..735: note = source = /note="Description of Artificial Sequence: Synthetic polypeptide"
MAADGYLPDWLEDTLSEGIRQWWKLKPGPPPPKPAERHKDDSRGLVLPGYKYLGPFNGLDKGEPVNEADAAALEHDKAYDRQLDSGDNPYLKYNHADAEFQERLKEDTSFGGNLGRAVFQAKKRVLEPLGLVEEPVKTAPGKKRPVEHSPVEPDSSSGTGKAGQQPARKRLNFGQTGDADSVPDPQPLGQPPAAPSGLGTNTMATGSGAPMADNNEGADGVGNSSGNWHCDSTWMGDRVITTSTRTWALPTYNNHLYKQISSQSGASNDNHYFGYSTPWGYFDFNRFHCHFSPRDWQRLINNNWGFRPKRLNFKLFNIQVKEVTQNDGTTTIANNLTSTVQVFTDSEYQLPYVLGSAHQGCLPPFPADVFMVPQYGYLTLNNGSQAVGRSSFYCLEYFPSQMLRTGNNFTFSYTFEDVPFHSSYAHSQSLDRLMNPLIDQYLYYLSRANTPSGTTTQSRLQFSQAGASDIRDQSRNWLPGPCYRQQRVSKTSADNNNSEYSWTGATKYHLNGRDSLVNPGPAMASHKDDEEKFFPQSGVLIFGKQGSEKTNVDIEKVMITDEEEIRTTNPVATEQYGSVSTNLQRGNRQAATADVNTQGVLPGMVWQDRDVYLQGPIWAKIPHTDGHFHPSPLMGGFGLKHPPPQILIKNTPVPANPSTTFSAAKFASFITQYSTGQVSVEIEWELQKENSKRWNPEIQYTSNYNKSVNVDFTVDTNGVYSEPRPIGTRYLTRNL

SEQ ID NO: 4074 - protein, 735 aa, synthetic construct
  REGION 1..735: note = source = /note="Description of Artificial Sequence: Synthetic polypeptide"
MAADGYLPDWLEDTLSEGIRQWWKLKPGPPPPKPAERHKDDSRGLVLPGYKYLGPFNGLDKGEPVNEADAAALEHDKAYDRQLDSGDNPYLKYNHADAEFQERLKEDTSFGGNLGRAVFQAKKRVLEPLGLVEEPVKTAPGKKRPVEHSPVEPDSSSGTGKAGQQPARKRLNFGQTGDADSVPDPQPLGQPPAAPSGLGTNTMATGSGAPMADNNEGADGVGNSSGNWHCDSTWMGDRVITTSTRTRALPTYNNHLYKQISSQSGASNDNHYFGYSTPWGYFDFNRFHCHFSPRDWQRLINNNWGFRPKRLNFKLFNIQVKEVTQNDGTTTIANNLTSTVQVFTDSEYQLPYVLGSAHQGCLPPFPADVFMVPQYGYLTLNNGSQAVGRSSFYCLEYFPSQMLRTGNNFTFSYTFEDVPFHSSYAHSQSLDRLMNPLIDQYLYYLSRTNTPSGTTTQSRLQFSQAGASDIRDQSRNWLPGPCYRQQRVSKTSADNNNSEYSWTGATKYHLNGRDSLVNPGPAMASHKDDEEKFFPQSGVLIFGKQGSEKTNVDIEKVMITDEEEIRTTNPVATEQYGSVSTNLQRGNRQAATADVNTQGVLPGMVWQDRDVYLQGPIWAKIPHTDGHFHPSPLMGGFGLKHPPPQILIKNTPVPANPSTTFSAAKFASFITQYSTGQVSVEIEWELQKENSKRWNPEIQYTSNYNKSVNVDFTVDTNGVYSEPRPIGTRYLTRNL

SEQ ID NO: 4075 - protein, 735 aa, synthetic construct
  REGION 1..735: note = source = /note="Description of Artificial Sequence: Synthetic polypeptide"
MAADGYLPDWLEDTLSEGIRQWWKLKPGPPPPKPAERHKDDSRGLVLPGYKYLGPFNGLDKGEPVNEADAAALEHDKAYDRQLDSGDNPYLKYNHADAEFQERLKEDTSFGGNLGRAVFQAKKRVLEPLGLVEEPVKTAPGKKRPVEHSPVEPDSSSGTGKAGQQPARKRLNFGQTGDADSVPDPQPLGQPPAAPSGLGTNTMATGSGAPMADNNEGADGVGNSSGNWHCDSTWMGDRVITTSTRTWALPTYNSHLYKQISSQSGASNDNHYFGYSTPWGYFDFNRFHCHFSPRDWQRLINNNWGFRPKRLNFKLFNIQVKEVTQNDGTTTIANNLTSTVQVFTDSEYQLPYVLGSAHQGCLPPFPADVFMVPQYGYLTLNNGSQAVGRSSFYCLEYFPSQMLRTGNNFTFSYTFEDVPFHSSYAHSQSLDRLMNPLIDQYLYYLSRTNTPSGTTTQSRLQFSQAGASDIRDQSRNWLPGPCYRQQRVSKTSADNNNSEYSWTGATKYHLNGRDSLVNPGPAMASHKDDEEKFFPQSGVLIFGKQGSEKTNVDIEKVMITDEEEIRTTNPVATEQYGSVSTNLQRGNRQAATADVNTQGVLPGMVWQDRDVYLQGPIWAKIPHTDGHFHPSPLMGGFGLKHPPPQILIKNTPVPANPSTTFSAAKFASFITQYSTGQVSVEIEWELQKENSKRWNPEIQYTSNYNKSVNVDFTVDTNGVYSEPRPIGTRYLTRNL

SEQ ID NO: 4076 - protein, 735 aa, synthetic construct
  REGION 1..735: note = source = /note="Description of Artificial Sequence: Synthetic polypeptide"
MAADGYLPDWLEDTLSEGIRQWWKLKPGPPPPKPAERHKDDSRGLVLPGYKYLGPFNGLDKGEPVNEADAAALEHDKAYDRQLDSGDNPYLKYNHADAEFQERLKEDTSFGGNLGRAVFQAKKRVLEPLGLVEEPVKTAPGKKRPVEHSPVEPDSSSGTGKAGQQPARKRLNFGQTGDADSVPDPQPLGQPPAAPSGLGTNTMATGSGAPMADNNEGADGVGNSSGNWHCDSTWMGDRVITTSTRTWALPTYNNHLYKQISSQSGASNDNHYFGYSTPWGYFDFNRFHCHFSPRDWQRLINNNWGFRPKRLNFKLFNIQVKEVTQNDGTTTIANNLTSTVQVFTDSEYQLPYVLGSAHQGCLPPFPADVFMVPQYGYLTLNNGSQAVGRSSFYCLEYFPSQMLRTGNNFTFSYTFEDVPFHSSYAHSQSLDRLMNPLIDQYLYYLSRTNTPSGTTTQSRLQFSQAGASDIRDQSRNWLPGPCYRQQRVSKTSADNNNSEYSWTGATKYHLNGRDSLVNPGPAMASHKDDEEKFFPQSGVLIFGKQGSEKTNVDIEKVMITDEEEIRTTNPVATEQYGSVSTNLQRGNRQAATADVNTQGVLPGMVWQDRDVYLQGPIWAKIPHTDGHFHPSPLMGGFGLKRPPPQILIKNTPVPANPSTTFSAAKFASFITQYSTGQVSVEIEWELQKENSKRWNPEIQYTSNYNKSVNVDFTVDTNGVYSEPRPIGTRYLTRNL

SEQ ID NO: 4077 - protein, 735 aa, synthetic construct
  REGION 1..735: note = source = /note="Description of Artificial Sequence: Synthetic polypeptide"
MAADGYLPDWLEDTLSEGIRQWWKLKPGPPPPKPAERHKDDSRGLVLPGYKYLGPFNGLDKGEPVNEADAAALEHDKAYDRQLDSGDNPYLKYNHADAEFQERLKEDTSFGGNLGRAVFQAKKRVLEPLGLVEEPVKTAPGKKRPVEHSPVEPDSSSGTGKAGQQPARKRLNFGQTGDADSVPDPQPLGQPPAAPSGLGTNTMATGSGAPMADNNEGADGVGNSSGNWHCDSTWMGDRVITTSTRTWALPTYNNHLYKQISSQSGASNDNHYFGYSTPWGYFDFNRFHCHFSPRDWQRLINNNWGFRPKRLNFKLFNIQVKEVTQNDGTTTIANNLTSTVQVFTDSEYRLPYVLGSAHQGCLPPFPADVFMVPQYGYLTLNNGSQAVGRSSFYCLEYFPSQMLRTGNNFTFSYTFEDVPFHSSYAHSQSLDRLMNPLIDQYLYYLSRTNTPSGTTTQSRLQFSQAGASDIRDQSRNWLPGPCYRQQRVSKTSADNNNSEYSWTGATKYHLNGRDSLVNPGPAMASHKDDEEKFFPQSGVLIFGKQGSEKTNVDIEKVMITDEEEIRTTNPVATEQYGSVSTNLQRGNRQAATADVNTQGVLPGMVWQDRDVYLQGPIWAKIPHTDGHFHPSPLMGGFGLKHPPPQILIKNTPVPANPSTTFSAAKFASFITQYSTGQVSVEIEWELQKENSKRWNPEIQYTSNYNKSVNVDFTVDTNGVYSEPRPIGTRYLTRNL

SEQ ID NO: 4078 - protein, 735 aa, synthetic construct
  REGION 1..735: note = source = /note="Description of Artificial Sequence: Synthetic polypeptide"
MAADGYLPDWLEDTLSEGIRQWWKLKPGPPPPKPAERHKDDSRGLVLPGYKYLGPFNGLDKGEPVNEADAAALEHDKAYDRQLDSGDNPYLKYNHADAEFQERLKEDTSFGGNLGRAVFQAKKRVLEPLGLVEEPVKTAPGKKRPVEHSPVEPDSSSGTGKAGQQPARKRLNFGQTGDADSVPDPQPLGQPPAAPSGLGTNTMATGSGAPMADNNEGADGVGNSSGNWHCDSTWMGDRVITTSTRTWALPTYNNHLYKQISSQSGASNDNHYFGYSTPWGYFDFNRFHCHFSPRDWQRLINNNWGFRPKRLNFKLFNIQVKEVTQNDGTTTIANNLTSTVRVFTDSEYQLPYVLGSAHQGCLPPFPADVFMVPQYGYLTLNNGSQAVGRSSFYCLEYFPSQMLRTGNNFTFSYTFEDVPFHSSYAHSQSLDRLMNPLIDQYLYYLSRTNTPSGTTTQSRLQFSQAGASDIRDQSRNWLPGPCYRQQRVSKTSADNNNSEYSWTGATKYHLNGRDSLVNPGPAMASHKDDEEKFFPQSGVLIFGKQGSEKTNVDIEKVMITDEEEIRTTNPVATEQYGSVSTNLQRGNRQAATADVNTQGVLPGMVWQDRDVYLQGPIWAKIPHTDGHFHPSPLMGGFGLKHPPPQILIKNTPVPANPSTTFSAAKFASFITQYSTGQVSVEIEWELQKENSKRWNPEIQYTSNYNKSVNVDFTVDTNGVYSEPRPIGTRYLTRNL

SEQ ID NO: 4079 - protein, 735 aa, synthetic construct
  REGION 1..735: note = source = /note="Description of Artificial Sequence: Synthetic polypeptide"
MAADGYLPDWLEDTLSEGIRQWWKLKPGPPPPKPAERHRDDSRGLVLPGYKYLGPFNGLDKGEPVNEADAAALEHDKAYDRQLDSGDNPYLKYNHADAEFQERLKEDTSFGGNLGRAVFQAKKRVLEPLGLVEEPVKTAPGKKRPVEHSPVEPDSSSGTGKAGQQPARKRLNFGQTGDADSVPDPQPLGQPPAALSGLGTNTMATGSGAPMADNNEGADGVGNSSGNWHCDSTWMGDRVITTSTRTWALPTYNNHLYKQISSQSGASNGNHYFGYSTPWGYFDFNRFHCHFSPRDWQRLINNNWGFRPKRLNFKLFNIQVKEVTQNDGTTTIANNLTSTVQVFTDSEYQLPYVLGSAHQGCLPPFPADVFMVPQYGYLTLNNGSQAVGRSSFYCLEYFPSQMLRTGNNFTFSYTFEDVPFHSSYAHSQSLDRLMNPLIDQYLYYLSRTNTPSGTTTQSRLQFSQAGASDIRDQSRNWLPGPCYRQQRVSKTSADNNNSEYSWTGATKYHLNGRDSLVNPGPAMASHKDDEEKFFPQSGVLIFGKQGSEKTNVDIEKVMITDEEEIRTTNPVATEQYGSVSTNLQRGNRQAATADVNTQGVLPGMVWQDRDVYLQGPIWAKIPHTDGHFHPSPLMGGFGLKHPPPQILIKNTPVPANPSTTFSAAKFASFITQYSTGQVSVEIEWELQKENSKRWNPEIQYTSNYNKSVNVDFTVDTNGVYSEPRPIGTRYLTRNL

SEQ ID NO: 4080 - protein, 735 aa, synthetic construct
  REGION 1..735: note = source = /note="Description of Artificial Sequence: Synthetic polypeptide"
MAADGYLPDWLEDTLSEGIRQWWKLKPGPPPPKPAERHRDDSRGLVLPGYKYLGPFNGLDKGEPVNEADAAALEHDKAYDRQLDSGDNPYLKYNHADAEFQERLKEDTSFGGNLGRAVFQAKKRVLEPLGLVGEPVKTAPGKKRPVEHSPVEPDSSSGTGKAGQQPARKRLNFGQTGDADSVPDPQPLGQPPAAPSGLGTNTMATGSGAPMADNNEGADGVGNSSGNWHCDSTWMGDRVITTSTRTWALPTYNNHLYKQISSQSGASNGNHYFGYSTPWGYFDFNRFHCHFSPRDWQRLINNNWGFRPKRLNFKLFNIQVKEVTQNDGTTTIANNLTSTVQVFTDSEYQLPYVLGSAHQGCLPPFPADVFMVPQYGYLTLNNGSQAVGRSSFYCLEYFPSQMLRTGNNFTFSYTFEDVPFHSSYAHSQSLDRLMNPLIDQYLYYLSRTNTPSGTTTQSRLQFSQAGASDIRDQSRNWLPGPCYRQQRVSKTSADNNNSEYSWTGATKYHLNGRDSLVNPGPAMASHKDDEEKFFPQSGVLIFGKQGSEKTNVDIEKVMITDEEEIRTTNPVATEQYGSVSTNLQRGNRQAATADVNTQGVLPGMVWQDRDVYLQGPIWAKIPHTDGHFHPSPLMGGFGLKHPPPQILIKNTPVPANPSTTFSAAKFASFITQYSTGQVSVEIEWELQKENSKRWNPEIQYTSNYNKSVNVDFTVDTNGVYSEPRPIGTRYLTRNL

SEQ ID NO: 4081 - protein, 735 aa, synthetic construct
  REGION 1..735: note = source = /note="Description of Artificial Sequence: Synthetic polypeptide"
MAADGYLPDWLEDTLSEGIRQWWKLKPGPPPPKPAERHRDDSRGLVLPGYKYLGPFNGLDKGEPVNEADAAALEHDKAYDRQLDSGDNPYLKYNHADAEFQERLKEDTSFGGNLGRAVFQAKKRVLEPLGLVEEPVKTAPGKKRPVEHSPVEPDSSSGTGKAGQQPARKRLNFGQTGDADSVPDPQPLGQPPAAPSGLGTNTMATGSGAPMADNNEGADGVGNSSGNWHYDSAWMGDRVITTSTRTWALPTYNNHLYKQISSQSGASNGNHYFGYSTPWGYFDFNRFHCHFSPRDWQRLINNNWGFRPKRLNFKLFNIQVKEVTQNDGTTTIANNLTSTVQVFTDSEYQLPYVLGSAHQGCLPPFPADVFMVPQYGYLTLNNGSQAVGRSSFYCLEYFPSQMLRTGNNFTFSYTFEDVPFHSSYAHSQSLDRLMNPLIDQYLYYLSRTNTPSGTTTQSRLQFSQAGASDIRDQSRNWLPGPCYRQQRVSKTSADNNNSEYSWTGATKYHLNGRDSLVNPGPAMASHKDDEEKFFPQSGVLIFGKQGSEKTNVDIEKVMITDEEEIRTTNPVATEQYGSVSTNLQRGNRQAATADVNTQGVLPGMVWQDRDVYLQGPIWAKIPHTDGHFHPSPLMGGFGLKHPPPQILIKNTPVPANPSTTFSAAKFASFITQYSTGQVSVEIEWELQKENSKRWNPEIQYTSNYNKSVNVDFTVDTNGVYSEPRPIGTRYLTRNL

SEQ ID NO: 4082 - protein, 735 aa, synthetic construct
  REGION 1..735: note = source = /note="Description of Artificial Sequence: Synthetic polypeptide"
MAADGYLPDWLEDTLSEGIRQWWKLKPGPPPPKPAERHRDDSRGLVLPGYKYLGPFNGLDKGEPVNEADAAALEHDKAYDRQLDSGDNPYLKYNHADAEFQERLKEDTSFGGNLGRAVFQAKKRVLEPLGLVEEPVKTAPGKKRPVEHSPVEPDSSSGTGKAGQQPARKRLNFGQTGDADSVPDPQPLGQPPAAPSGLGTNTMATGSGAPMADNNEGADGVGNSSGNWHCDSTWMGDRVITTSTRTWALPTYNNHLYKQISSQSGASNGNHYFGYSTPWGYFDFNRFHCHFSPRDWQRLINNNWGFRPKRLNFKLFNIQVKEVTQNDGTTTIANNLTSTVQVFTDSEYQLPYVLGSAHQGCLPPFPADVFMVPQYGYLTLNNGSQAVGRSSFYCLEYFPSQMLRTGNNFTFSYTFEDVPFHSSYAHSQSLDRLMNPLIDQYLYYLSRTNTPSGTTTQSRLQFSQAGASDIRDQSRNWLPGPCYRQQRVSKTSADNNNSEYSWTGATKYHLNGRDSLVNPGPAMASHKDDEEKFFPQSGVLIFGKQGSEKTNVDIEKVMITDEEEIRTTNPVATEQYGSVSTNLQRGNRQAATADVNTQGVLPGMVWQDRDVYLQGPIWAKIPHTDGHFHPSPLMGGFGLKHPPPQILIKNTPVPANPSTTFSAAKFASFIAQYSTGQVSVEIEWELQKENSKRWNPEIQYTSNYNKSVNVDFTVDTNGVYSEPRPIGTRYLTRNL

SEQ ID NO: 4083 - protein, 735 aa, synthetic construct
  REGION 1..735: note = source = /note="Description of Artificial Sequence: Synthetic polypeptide"
MAADGYLPDWLEDTLSEGIRQWWKLKPGPPPPKPAERHRDDSRGLVLPGYKYLGPFNGLDKGEPVNEADAAALEHDKAYDRQLDSGDNPYLKYNHADAEFQERLKEDTSFGGNLGRAVFQAKKRVLEPLGLVEEPVKTAPGKKRPVEHSPVEPDSSSGTGKAGQQPARKRLNFGQTGDADSVPDPQPLGQPPAAPSGLGTNTMATGSGAPMADNNEGADGVGNSSGNWHCDSTWMGDRVITTSTRTWALPTYNNHLYKQISSQSGASNGNHYFGYSTPWGYFDFNRFHCHFSPRDWQRLINNNWGFRPKRLNFKLFNIQVKEVTQNDGTTTIANNLTSTVQVFTDSEYQLPYVLGSAHQGCLPPFPADVFMVPQYGYLTLNNGSQAVGRSSFYCLEYFPSQMLRTGNNFTFSYTFEDVPFHSSYAHSQSLDRLMNPLIDQYPYYLSRTNTPSGTTTQSRLQFSQAGASDIRDQSRNWLPGPCYRQQRVSKTSADNNNSEYSWTGATKYHLNGRDSLVNPGPAMASHKDDEEKFFPQSGVLIFGKQGSEKTNVDIEKVMITDEEEIRTTNPVATEQYGSVSTNLQRGNRQAATADVNTQGVLPGMVWQDRDVYLQGPIWAKIPHTDGHFHPSPLMGGFGLKHPPPQILIKNTPVPANPSTTFSAAKFASFITQYSTGQVSVEIEWELQKENSKRWNPEIQYTSNYNKSVNVDFTVDTNGVYSEPRPIGTRYLTRNL

SEQ ID NO: 4084 - protein, 735 aa, synthetic construct
  REGION 1..735: note = source = /note="Description of Artificial Sequence: Synthetic polypeptide"
MAADGYLPDWLEDTLSEGIRQWWKLKPGPPPPKPAERHRDDSRGLVLPGYKYLGPFNGLDKGEPVNEADAAALEHDKAYDRQLDSGDNPYLKYNHADAEFQERLKEDTSFGGNLGRAVFQAKKRVLEPLGLVEEPVKTAPGKKRPVEHSPVEPDSSSGTGKAGQQPARKRLNFGQTGDADSVPDPQPLGQPPAAPSGLGTNTMATGSGAPMADNNEGADGVGNSSGNWHCDSTWMGDRVITTSTRTWALPTYNNHLYKQISSQSGASNGNHYFGYSTPWGYFDFNRFHCHFSPRDRQRLINNNWGFRPKRLNFKLFNIQVKEVTQNDGTTTIANNLTSTVQVFTDSEYQLPYVLGSAHQGCLPPFPADVFMVPQYGYLTLNNGSQAVGRSSFYCLEYFPSQMLRTGNNFTFSYTFEDVPFHSSYAHSQSLDRLMNPLIDQYLYYLSRTNTPSGTTTQSRLQFSQAGASDIRDQSRNWLPGPCYRQQRVSKTSADNNNSEYSWTGATKYHLNGRDSLVNPGPAMASHKDDEEKFFPQSGVLIFGKQGSEKTNVDIEKVMITDEEEIRTTNPVATEQYGSVSTNLQRGNRQAATADVNTQGVLPGMVWQDRDVYLQGPIWAKIPHTDGHFHPSPLMGGFGLKHPPPQILIKNTPVPANPSTTFSAAKFASFITQYSTGQVSVEIEWELQKENSKRWNPEIQYTSNYNKSVNVDFTVDTNGVYSEPRPIGTRYLTRNL

SEQ ID NO: 4085 - protein, 735 aa, synthetic construct
  REGION 1..735: note = source = /note="Description of Artificial Sequence: Synthetic polypeptide"
MAADGYLPDWLEDTLSEGIRQWWKLKPGPPPPKPAERHRDDSRGLVLPGYKYLGPFNGLDKGEPVNEADAAALEHDKAYDRQLDSGDNPYLKYNHADAEFQERLKEDTSFGGNLGRAVFQAKKRVLEPLGLVEEPVKTAPGKKRPVEHSPVEPDSSSGTGKAGQQPARKRLNFGQTGDADSVPDPQPLGQPPAAPSGLGTNTMATGSGAPMADNNEGADGVGNSSGNWHCDSTWMGDRVITTSTRTWALPTYNNHLYKQISSQSGASNGNHYFGYSTPWGYFDFNRFHCHFSPRDWQRLINNNWGFRPKRLNFKLFNIQVKEVTQNDGTTTIANNLTSTVQVFTDSEYQLPYVLGSAHQGCLPPFPADVFMVPQYGYLTLNNGSQAVGRSSFYCLEYFPSQMLRTGNNFTFSYTFEDVPFHSSYAHSQSLDRLMNPLIDQYLYYLSRTNTPSGTTTQSRLQFSQAGASDIRDQSRNWLPGPCYRQQRVSKTSADNNNSEYSWTGATKYHLNGRDSLVNPGPAMASHKDDEEKFFPQSGVLIFGKQGSEKTNVDIEKVMITDEEEIRTTNPVATEQYGSVSTNLQRGNRQAATADVNTQGVLPGMVWQDRDVYLQGPIWAKIPHTDGHFHPSPLMGGFGLKHPPPQILIKNTPVPANPSTTFSAAKFASFITQYSTGQVSVEIEWELQKENSKRWNPEIQYTSNYNKSVNVDLTVDTNGVYSEPRPIGTRYLTRNL

SEQ ID NO: 4086 - protein, 735 aa, synthetic construct
  REGION 1..735: note = source = /note="Description of Artificial Sequence: Synthetic polypeptide"
MAADGYLPDWLEDTLSEGIRQWWKLKPGPPPPKPAERHRDDSRGLALPGYKYLGPFNGLDKGEPVNEADAAALEHDKAYDRQLDSGDNPYLKYNHADAEFQERLKEDTSFGGNLGRAVFQAKKRVLEPLGLVEEPVKTAPGKKRPVEHSPVEPDSSSGTGKAGQQPARKRLNFGQTGDADSVPDPQPLGQPPAAPSGLGTNTMATGSGAPMADNNEGADGVGNSSGNWHCDSTWMGDRVITTSTRTWALPTYNNHLYKQISSQSGASNGNHYFGYSTPWGYFDFNRFHCHFSPRDWQRLINNNWGFRPKRLNFKLFNIQVKEVTQNDGTTTIANNLTSTVQVFTDSEYQLPYVLGSAHQGCLPPFPADVFMVPQYGYLTLNNGSQAVGRSSFYCLEYFPSQMLRTGNNFTFSYTFEDVPFHSSYAHSQSLDRLMNPLIDQYLYYLSRTNTPSGTTTQSRLQFSQAGASDIRDQSRNWLPGPCYRQQRVSKTSADNNNSEYSWTGATKYHLNGRDSLVNPGPAMASHKDDEEKFFPQSGVLIFGKQGSEKTNVDIEKVMITDEEEIRTTNPVATEQYGSVSTNLQRGNRQAATADVNTQGVLPGMVWQDRDVYLQGPIWAKIPHTDGHFHPSPLMGGFGLKHPPPQILIKNTPVPANPSTTFSAAKFASFITQYSTGQVSVEIEWELQKENSKRWNPEIQYTSNYNKSVNVDFTVDTNGVYSEPRPIGTRYLTRNL

SEQ ID NO: 4087 - protein, 735 aa, synthetic construct
  REGION 1..735: note = source = /note="Description of Artificial Sequence: Synthetic polypeptide"
MAADGYLPDWLEDTLSEGIRQWWKLKPGPPPPKPAERHRDDSRGLVLPGYKYLGPFNGLDKGEPVNEADAAALEHDKAYDRQLDSGDNPYLKYNHADAEFQERLKEDTSFGGNLGRAVFQAKKRVLEPLGLVEEPVKTAPGKKRPVEHSPVEPDSSSGTGKAGQQPARKRLNFGQTGDADSVPDPQPLGQPPAAPSGLGTNTMATGSGAPMADNNEGADGVGNSSGNWHCDSTWMGDRVITTSTRTWALPTYNNHLYKQISSQSGASNGNHYFGYSTPWGYFDFNRFHCHFSPRDWQRLINNNWGFRPKRLNFKLFNIQVKEVTQNDGTTTIANNLTSTVQVFTDSEYQLPYVLGSAHQGCLPPFPADVFMVPQYGYLTLNNGSQAVGRSSFYCLEYFPSQMLRTGNNFTFSYTFEDVPFHSSYAHSQSLDRLMNPLIDQYLYYLSRTNTPSGTTTQSRLQFSQAGASDIRDQSRNWLPGPCYRQQRVSKTSADNNNSEYSWTGATKYHLNGRDSLVNPGPAMASHKDDEEKFFPQSGVLIFGKQGSEKTNVDIEKVMITDEEEIRTTNPVATEQYGSVSTNLQRGNRQAATADANTQGVLPGMVWQDRDVYLQGPIWAKIPHTDGHFHPSPLMGGFGLKHPPPQILIKNTPVPANPSTTFSAAKFASFITQYSTGQVSVEIEWELQKENSKRWNPEIQYTSNYNKSVNVDFTVDTNGVYSEPRPIGTRYLTRNL

SEQ ID NO: 4088 - protein, 735 aa, synthetic construct
  REGION 1..735: note = source = /note="Description of Artificial Sequence: Synthetic polypeptide"
MAADGYLPDWLEDTLSEGIRQWWKLKPGPPPPKPAERHRDDSRGLVLPGYKYLGPFNGLDKGEPVNEADAAALEHDKAYDRQLDSGDNPYLKYNHADAEFQERLKEDTSFGGNLGRAVFQAKKRVLEPLGLVEEPVKTAPGKKRPVEHSPVEPDSSSGTGKAGQQPARKRLNFGQTGDADSVPDPQPLGQPPAAPSGLGTNTMATGSGAPMADNNEGADGVGNSSGNWHCDSTWMGDRVITTSTRTWALPTYNNHLYKQISSQSGASNGNHYFGYSTPWGYFDFNRFHCHFSPRDWQRLINNNWGFRPKRLNFKLFNIQVKEVTQNDGTTTIANNLTSTVQVFTDSEYQLPYVLGSAHQGCLPPFPADVFMVPQYGYLTLNNGSQAVGRSSFYCLEYFPSQMLRTGNNFTFSYTFEDVPFHSSYAHSQSLDRLMNPLIDQYLYYLSRTNTPSGTTTQSRLQFSQAGASDIRDQSRNWLPGPCYRQQRVSKTSADNNNSEYSWTGATKYHLNGRDSLVNPGPAMASHKDDEEKFFPQSGVLIFGKQGSEKTNVDIEKVMITDEGEIRTTNPVATEQYGSVSTNLQRGNRQAATADVNTQGVLPGMVWQDRDVYLQGPIWAKIPHTDGHFHPSPLMGGFGLKHPPPQILIKNTPVPANPSTTFSAAKFASFITQYSTGQVSVEIEWELQKENSKRWNPEIQYTSNYNKSVNVDFTVDTNGVYSEPRPIGTRYLTRNL

SEQ ID NO: 4089 - protein, 735 aa, synthetic construct
  REGION 1..735: note = source = /note="Description of Artificial Sequence: Synthetic polypeptide"
MAADGYLPDWLEDTLSEGIRQWWKLKPGPPPPKPAERHRDDSRGLVLPGYKYLGPFNGLDKGEPVNEADAAALEHDKAYDRQLDSGDNPYLKYNHADAEFQERLKEDTSFGGNLGRAVFQAKKRVLEPLGLVEEPVKTAPGKKRPVEHSPVEPDSSSGTGKAGQQPARKRLNFGQTGDADSVPDPQPLGQPPAAPSGLGTNTMATGSGAPMADNNEGADGVGNSSGNWHCDSTWMGDRVITTSTRTWALPTYNNHLYKQISSQSGASNGNHYFGYSTPWGYFDFNRFHCHFSPRDWQRLINNNWGFRPKRLNFKLFNIQVKEVTQNDGTTTIANNLTSTVQVFTDSEYQLPYVLGSAHQGCLPPFPADVFMVPQYGYLTLNNGSQAVGRSSFYCLEYFPSQMLRTGNNFTFSYTFEDVPFHSSYAHSQSLDRLMNPLIDQYLYYLSRTNTPSGTTTQSRLQFSQAGASDIRDQSRNWLPGPCYRQQRVSKTSADNNNSEYSWTGATKYHLNGRDSLVNPGPAMASHKDDEEKFFPQSGVLIFGKQGSEKTNVDIEKVMITDEEEIRTTNPVATEQYGSVSTNLQRGNRQAATADVNTQGVLPGMVWQDRDVYLQGPIWAKIPHTDGHFHPSPPMGGFGLKHPPPQILIKNTPVPANPSTTFSAAKFASFITQYSTGQVSVEIEWELQKENSKRWNPEIQYTSNYNKSVNVDFTVDTNGVYSEPRPIGTRYLTRNL

SEQ ID NO: 4090 - protein, 735 aa, synthetic construct
  REGION 1..735: note = source = /note="Description of Artificial Sequence: Synthetic polypeptide"
MAADGYLPDWLEDTLSEGIRQWWKLKPGPPPPKPAERHRDDSRGLVLPGYKYLGPFNGLDKGEPVNEADAAALEHDKAYDRQLDSGDNPYLKYNHADAEFQERLKEDTSFGGNLGRAVFQAKKRVLEPLGLVEEPVKTAPGKKRPVEHSPVEPDSSSGTGKAGQQPARKRLNFGQTGDADSVPDPQPLGQPPAAPSGLGTNTMATGSGAPMADNNEGADGVGNSSGNWHCDSTWMGDRVITTSTRTWALPTYNNHLYKQISSQSGASNGNHYFGYSTPWGYFDFNRFHCHFSPRDWQRLINNNWGFRPKRLNFKLFNIQVKEVTQNDGTTTIANNLTSTVQVFTDSEYQLPYVLGSAHQGCLPPFPADVFMVPQYGYLTLNNGSQAVGRSSFYCLEYFPSQMLRTGNNFTFSYTFEDVPFHSSYAHSQSLDRLMNPLIDQYLYYLSRTNTPSGTTTQSRLQFSQAGASDIRDQSRNWLPGPCYRQQRVSKTSADNNNSEYSWTGATKYHLNGRDSLVNPGPAMASHKDDEEKFFPQSGVLIFGKQGSEKTNVDIEKVMITDEEEIRTTNPVATEQYGSVSTNLQRGNRQAATADVNTQGVLPGMVWQDRDVYLQGPIWAKIPHTDGHFHPSPLMGGFGLKHPPPQILIKNTPVPANPSTTFSAAKFASFITQYSTGQVSVEIEWELQKENSKRWNPEIQYTSDYNKSVNVDFTVDTNGVYSEPRPIGTRYLTRNL

SEQ ID NO: 4091 - protein, 735 aa, synthetic construct
  REGION 1..735: note = source = /note="Description of Artificial Sequence: Synthetic polypeptide"
MAADGYLPDWLEDTLSEGIRQWWKLKPGPPPPKPAERHRDDSRGLVLPGYKYLGPFNGLDKGEPVNEADAAALEHDKAYDRQLDSGDNPYLKYNHADAEFQERLKEDTSFGGNLGRAVFQAKKRVLEPLGLVEEPVKTAPGKKRPVEHSPVEPDSSSGTGKAGQQPARKRLNFGQTGDADSVPDPQPLGQPPAAPSGLGTNTMATGSGAPMADNNEGADGVGNSSGNWHCDSTWMGDRVITTSTRTWALPTYNNHLYKQISSQSGASNGNHYFGYSTPWGYFDFNRFHCHFSPRDWQRLINNNWGFRPKRLNFKLFNIQVKEVTQNGGTTTIANNLTSTVQVFTDSEYQLPYVLGSAHQGCLPPFPADVFMVPQYGYLTLNNGSQAVGRSSFYCLEYFPSQMLRTGNNFTFSYTFEDVPFHSSYAHSQSLDRLMNPLIDQYLYYLSRTNTPSGTTTQSRLQFSQAGASDIRDQSRNWLPGPCYRQQRVSKTSADNNNSEYSWTGATKYHLNGRDSLVNPGPAMASHKDDEEKFFPQSGVLIFGKQGSEKTNVDIEKVMITDEEEIRTTNPVATEQYGSVSTNLQRGNRQAATADVNTQGVLPGMVWQDRDVYLQGPIWAKIPHTDGHFHPSPLMGGFGLKHPPPQILIKNTPVPANPSTTFSAAKFASFITQYSTGQVSVEIEWELQKENSKRWNPEIQYTSNYNKSVNVDFTVDTNGVYSEPRPIGTRYLTRNL

SEQ ID NO: 4092 - protein, 735 aa, synthetic construct
  REGION 1..735: note = source = /note="Description of Artificial Sequence: Synthetic polypeptide"
MAADGYLPDWLEDTLSEGIRQWWKLKPGPPPPKPAERHRDDSRGLVLPGYKYLGPFNGLDKGEPVNEADAAALEHDKAYDRQLDSGDNPYLKYNHADAEFQERLKEDTSFGGNLGRAVFQAKKRVLEPLGLVEEPVKTAPGKKRPVEHSPVEPDSSSGTGKAGQQPARKRLNFGQTGDADSVPDPQPLGQPPAAPSGLGTNTMATGSGAPMADNNEGADGVGNSSGNWHCDSTWMGDRVITTSTRTWALPTYNNHLYKQISSQSGASNGNHYFGYSTPWGYFDFNRFHCHFSPRDWQRLINNNWGFRPKRLNFKLFNIQVKEVTQNDGTTTIANNLTSTVQVFTDSEYQLPYVLGSAHQGCLPPFPADVFMVPQYGYLTLNNGSQAVGRSSFYCLEYFPSQMLRTGNNFTFSYTFEDVPFHSSYAHSQSLDRLMNPLIDQYLYYLSRTNTPSGTTTQSRLQFSQAVASDVRDQSRNWLPGPCYRQQRVSKTSADNNNSEYSWTGATKYHLNGRDSLVNPGPAMASHKDDEEKFFPQSGVLIFGKQGSEKTNVDIEKVMITDEEEIRTTNPVATEQYGSVSTNLQRGNRQAATADVNTQGVLPGMVWQDRDVYLQGPIWAKIPHTDGHFHPSPLMGGFGLKHPPPQILIKNTPVPANPSTTFSAAKFASFITQYSTGQVSVEIEWELQKENSKRWNPEIQYTSNYNKSVNVDFTVDTNGVYSEPRPIGTRYLTRNL

SEQ ID NO: 4093 - protein, 735 aa, synthetic construct
  REGION 1..735: note = source = /note="Description of Artificial Sequence: Synthetic polypeptide"
MAADGYLPDWLEDTLSEGIRQRWKLKPGPPPPKPAERHRDDSRGLVLPGYKYLGPFNGLDKGEPVNEADAAALEHDKAYDRQLDSGDNPYLKYNHADAEFQERLKEDTSFGGNLGRAVFQAKKRVLEPLGLVEEPVKTAPGKKRPVEHSPVEPDSSSGTGKAGQQPARKRLNFGQTGDADSVPDPQPLGQPPAAPSGLGTNTMATGSGAPMADNNEGADGVGNSSGNWHCDSTWMGDRVITTSTRTWALPTYNNHLYKQISSQSGASNGNHYFGYSTPWGYFDFNRFHCHFSPRDWQRLINNNWGFRPKRLNFKLFNIQVKEVTQNDGTTTIANNLTSTVQVFTDSEYQLPYVLGSAHQGCLPPFPADVFMVPQYGYLTLNNGSQAVGRSSFYCLEYFPSQMLRTGNNFTFSYTFEDVPFHSSYAHSQSLDRLMNPLIDQYLYYLSRTNTPSGTTTQSRLQFSQAGASDIRDQSRNWLPGPCYRQQRVSKTSADNNNSEYSWTGATKYHLNGRDSLVNPGPAMASHKDDEEKFFPQSGVLIFGKQGSEKTNVDIEKVMITDEEEIRTTNPVATEQYGSVSTNLQRGNRQAATADVNTQGVLPGMVWQDRDVYLQGPIWAKIPHTDGHFHPSPLMGGFGLKHPPPQILIKNTPVPANPSTTFSAAKFASFITQYSTGQVSVEIEWELQKENSKRWNPEIQYTSNYNKSVNVDFTVDTNGVYSEPRPIGTRYLTRNL

SEQ ID NO: 4094 - protein, 735 aa, synthetic construct
  REGION 1..735: note = source = /note="Description of Artificial Sequence: Synthetic polypeptide"
MAADGYLPDWLEDTLSEGIRQWWKLKPGPPPPKPAERHKDDSRGLVLPGYKYLGPFNGLDKGEPVNEADAAALEHDKAYDRQLDSGDNPYLKYNHADAEFQERLKEDTSFGGNLGRAVFQAKKRVLEPLGLVEEPVKTAPGKKRPVEHSPVEPDSSSGTGKAGQQPARKRLNFGQTGDADSVPDPQPLGQPPAAPSGLGTNTMATGSGAPMADNNEGADGVGNSSGNWHCDSTWMGDRVITTSTRTWALPTYNNHLYKQISSQSGASNDNHYFGYSTPWGYFDFNRFHCHFSPRDWQRLINNNWGFRPKRLNFKLFNIQVKEVTQNDGTTTIANNLTSTVQVFTDSEYQLPYVLGSAHQGCLPPFPADVFMVPQYGYLTLNNGSQAVGRSSFYCLEYFPSQMLRTGNNFTFSYTFEDVPFHSSYAHSQSLDRLMNPLIDQYLYYLSRTNTPSGTTTQSRLQFSQAGASDIRDQSRNWLPGPCYRQQRVSKTSADNNNSEYSWTGATKYHLNGRDSLVNPGPAMASHKDDEEKFFPQSGVLIFGKQGSEKTNVDIEKVMTTDEEEIRTTNPVATEQYGSVSTNLQRGNRQAATADVNTQGVLPGMVWQDRDVYLQGPIWAKIPHTDGHFHPSPLMGGFGLKHPPPQILIKNTPVPANPSTTFSAAKFASFITQYSTGQVSVEIEWELQKENSKRWNPEIQYTSNYNKSVNVDFTVDTNGVYSEPRPIGTRYLTRNL

SEQ ID NO: 4095 - protein, 735 aa, synthetic construct
  REGION 1..735: note = source = /note="Description of Artificial Sequence: Synthetic polypeptide"
MAADGYLPDWLEDTLSEGIRQWWKLKPGPPPPKPAERHKDDSRGLVLPGYKYLGPFNGLDKGEPVNEADAAALEHDKAYDRQLDSGDNPYLKYNHADAEFQERLKEDTSFGGNLGRAVFQAKKRVLEPPGLVEEPVKTAPGKKRPVEHSPVEPDSSSGTGKAGQQPARKRLNFGQTGDADSVPDPQPLGQPPAAPSGLGTNTMATGSGAPMADNNEGADGVGNSSGNWHCDSTWMGDRVITTSTRTWALPTYNNHLYKQISSQSGASNDNHYFGYSTPWGYFDFNRFHCHFSPRDWQRLINNNWGFRPKRLNFKLFNIQVKEVTQNDGTTTIANNLTSTVQVFTDSEYQLPYVLGSAHQGCLPPFPADVFMVPQYGYLTLNNGSQAVGRSSFYCLEYFPSQMLRTGNNFTFSYTFEDVPFHSSYAHSQSLDRLMNPLIDQYLYYLSRTNTPSGTTTQSRLQFSQAGASDIRDQSRNWLPGPCYRQQRVSKTSADNNNSEYSWTGATKYHLNGRDSLVNPGPAMASHKDDEEKFFPQSGVLIFGKQGSEKTNVDIEKVMTTDEEEIRTTNPVATEQYGSVSTNLQRGNRQAATADVNTQGVLPGMVWQDRDVYLQGPIWAKIPHTDGHFHPSPLMGGFGLKHPPPQILIKNTPVPANPSTTFSAAKFASFITQYSTGQVSVEIEWELQKENSKRWNPEIQYTSNYNKSVNVDFTVDTNGVYSEPRPIGTRYLTRNL

SEQ ID NO: 4096 - protein, 735 aa, synthetic construct
  REGION 1..735: note = source = /note="Description of Artificial Sequence: Synthetic polypeptide"
MAADGYLPDWLEDTLSEGIRQWWKLKPGPPPPKPAERHKDDSRGLVLPGYKYLGPFNGLDKGEPVNEADAAALEHDKAYDRQLDSGDNPYLKYNHADAEFQERLKEDTSFGGNLGRAVFQAKKRVLEPLGLVEEPVKTAPGKKRPVEHSPVEPDSSSGTGKAGQQPARKRLNFGQTGDADSVPDPQPLGQPPAAPSGLGTNTMATGSGAPMADNNEGADGVGNSSGNWHCDSTWMGDRVITTSTRTWALPTYNNHLYKQISSQSGASNDNHYFGYSTPWGYFDFNRFHCHFSPRDWQRLINNNWGFRPKRLNFKLFNIQVKEVTQNDGTTTIANNLTSTVQVFTDSEYQLPYVLGSAHQGCLPPFPADVFMVPQYGYLTLNNGSQAVGRSSFYCLEYFPSQMLRTGNNFTFSYTFEDVPFHSSYAHSQSLDRLMNPLIDQYLYYLSRTNTPSGTTTQSRLQFSQAGASDIRDQSRNWLPGPCYRQQRVSKTSADNNNSEYSWTGATKYHLNGRDSLVNPGPAMASHKDDEEKFFPQSGVLIFGKQGSEKTNVDIEKVMTTDEEEIRTTNPVATEQYGSVSTNLQRGNRQAATADVNTQGVLPGMVWQDRDVYLQGPIWAKIPHTDGHFHPSPLMGGFGLKHPPPQILIKNTPVPANPSTTFSAAKFASFITQYSTGQVSVEIEWELQKENGKRWNPEIQYTSNYNKSVNVDFTVDTNGVYSEPRPIGTRYLTRNL

SEQ ID NO: 4097 - protein, 735 aa, synthetic construct
  REGION 1..735: note = source = /note="Description of Artificial Sequence: Synthetic polypeptide"
MAADGYLPDWLEDTLSEGIRQWWKLKPGPPPPEPAERHKDDSRGLVLPGYKYLGPFNGLDKGEPVNEADAAALEHDKAYDRQLDSGDNPYLKYNHADAEFQERLKEDTSFGGNLGRAVFQAKKRVLEPLGLVEEPVKTAPGKKRPVEHSPVEPDSSSGTGKAGQQPARKRLNFGQTGDADSVPDPQPLGQPPAAPTSLGSTTMATGSGAPMADNNEGADGVGNSSGNWHCDSQWLGDRVITTSTRTWALPTYNNHLYKQISSQSGASNDNHYFGHSTPWGYFDFNRFHCHFSPRDWQRLINNNWGFRPKRLNFKLFNIQVKEVTQNDGTTTIANNLTSTVQVFTDSEYQLPYVLGSAHQGCLPPFPADVFMVPQYGYLTLNNGSQAVGRSSFYCLEYFPSQMLRTGNNFTFSYTFEDVPFHSSYAHSQSLDRLMNPLIDQYLYYLNKTQSNSGTLQQSRLLFSQAGPTSMSLQAKNWLPGPCYRQQRLSKQANDNNNSNFPWTAATKYHLNGRDSLVNPGPAMASHKDDEEKFFPMHGTLIFGKQGTNANDADLDNVMITDEEEIRTTNPVATEQYGTVSNNLQNSNTGPTTGTVNHQGALPGMVWQDRDVYLQGPIWAKIPHTDGHFHPSPLMGGFGLKHPPPQIMIKNTPVPANPPTNFSSAKFASFITQYSTGQVSVEIEWELQKENSKRWNPEIQYTSNYNKSVNVDFTVDTNGVYSEPRPIGTRYLTRNL

SEQ ID NO: 4098 - protein, 735 aa, synthetic construct
  REGION 1..735: note = source = /note="Description of Artificial Sequence: Synthetic polypeptide"
MAADGYLPDWLEDTLSEGIRQWWKLKPGPPPPKPAERHKDDSRGLVLPGYKYLGPFNGLDKGEPVNEADAAALEHDKAYDRQLDSGDNPYLKYNHADAEFQERLKEDTSFGGNLGRAVFQAKKRVLEPLGLVEEPVKTAPGKKRPVEHSPVEPDSSSGTGKAGQQPARKRLNFGQTGDADSVPDPQPLGQPPAAPTSLGSTTMATGSGAPMADNNEGADGVGNSSGNWHCDSQWLGDRVITTSTRTWALPTYNNHLYKQISSQSGASNDNHYFGHSTPWGYFDFNRFHCHFSPRDWQRLINNNWGFRPKRLNFKLFNIQVKEVTQNDGTTTIANNLTSTVQVFTDSEYQLPYVLGSAHQGCLPPFPADVFMVSQYGYLTLNNGSQAVGRSSFYCLEYFPSQMLRTGNNFTFSYTFEDVPFHSSYAHSQSLDRLMNPLIDQYLYYLNKTQSNSGTLQQSRLLFSQAGPTSMSLQAKNWLPGPCYRQQRLSKQANDNNNSNFPWTAATKYHLNGRDSLVNPGPAMASHKDDEEKFFPMHGTLIFGKQGTNANDADLDNVMITDEEEIRTTNPVATEQYGTVSNNLQNSNTGPTTGTVNHQGALPGMVWQDRDVYLQGPIWAKIPHTDGHFHPSPLMGGFGLKHPPPQIMIKNTPVPANPPTNFSSAKFASFITQYSTGQVSVEIEWELQKENSKRWNPEIQYTSNYNKSVNVDFTVDTNGVYSEPRPIGTRYLTRNL

SEQ ID NO: 4099 - protein, 735 aa, synthetic construct
  REGION 1..735: note = source = /note="Description of Artificial Sequence: Synthetic polypeptide"
MAADGYLPDWLEDTLSEGIRQWWKLKPGPPPPKPAERHKDDSRGLVLPGYKYLGPFNGLDKGEPVNEADAAALEHDKAYDRQLDSGDNPYLKYNHADAEFQERLKEDTSFGGNLGRAVFQAKKRVLEPLGLVEEPVKTAPGKKRPVEHSPVEPDSSSGTGKAGQQPARKRLNFGQTGDADSVPDPQPLGQPPAAPTSLGSTTMATGSGAPMADNNEGADGVGNSSGNWHCDSQWLGDRVITTSTRTWALPTYNNHLYKQISSQSGASNDNHYFGHSTPWGYFDFNRFHCHFSPRDWQRLINNNWGFRPKRLNFKLFNIQVKEVTQNDGTTTIANNLTSTVQVFTDSEYQLPYVLGSAHQGCLPPFPADVFMVSQYGYLTLNNGSQAVGRSSFYCLEYFPSQMLRTGNNFTFSYTFEDVPFHSSYAHSQSLDRLMNPLIDQYLYYLNKTQSNSGTLQQSRLLFSQAGPTSMSLQAKNWLPGPCYRQQRLSKQANDNNNSNFPWTAATKYHLNGRDSLVNPGPAMASHKDDEEKLFPMHGTLIFGKQGTNANDADLDNVMITDEEEIRTTNPVATEQYGTVSNNLQNSNTGPTTGTVNHQGALPGMVWQDRDVYLQGPIWAKIPHTDGHFHPSPLMGGFGLKHPPPQIMIKNTPVPANPPTNFSSAKFASFITQYSTGQVSVEIEWELQKENSKRWNPEIQYTSNYNKSVNVDFTVDTNGVYSEPRPIGTRYLTRNL

SEQ ID NO: 4100 - protein, 735 aa, synthetic construct
  REGION 1..735: note = source = /note="Description of Artificial Sequence: Synthetic polypeptide"
MAADGYLPDWLEDTLSEGIRQWWKLKPGPPPPKPAERHKDDSRGLVLPGYKYLGPFNGLDKGEPVNEADAAALEHDKAYDRQLDSGDNPYLKYNHADAEFQERLKEDTSFGGNLGRAVFQAKKRVLEPLGLVEEPVKTAPGKKRPVEHSPVEPDSSSGTGKAGQQPARKRLNFGQTGDADSVPDPQPLGQPPAAPTSLGSTTMATGSGAPMADNNEGADGVGNSSGNWHCDSQWLGDRVITTSTRTWALPTYNNHLYKQISSQSGASNDNHYFGHSTPWGYFDFNRFHCHFSPRDWQRLINNNWGFRPKRLNFKLFNIQVKEVTQNDGTTTIANNLTSTVQVFTDSEYQLPYVLGSAHQGCLPPFPADVFMVPQYGYLTLNNGSQAVGRSSFYCLEYFPSQMLRTGNNFTFSYTFEDVPFHSSYAHSQSLDRLMNPLIDQYLYYLNKTQSNSGTLQQSRLLFSQAGPTSMSLQAKNWLPGPCYRQQRLSKQANDNNNSNFSWTAATKYHLNGRDSLVNPGPAMASHKDDEEKFFPMHGTLIFGKQGTNANDADLDNVMITDEEEIRTTNPVATEQYGTVSNNLQNSNTGPTTGTVNHQGALPGMVWQDRDVYLQGPIWAKIPHTDGHFHPSPLMGGFGLKHPPPQIMIKNTPVPANPPTNFSSAKFASFITQYSTGQVSVEIEWELQKENSKRWNPEIQYTSNYNKSVNVDFTVDTNGVYSEPRPIGTRYLTRNL

SEQ ID NO: 4101 - protein, 735 aa, synthetic construct
  REGION 1..735: note = source = /note="Description of Artificial Sequence: Synthetic polypeptide"
MAADGYLPDWLEDTLSEGIRQWWKLKPGPPPPKPAERHKDDSRGLVLPGYKYLGPFNGLDKGEPVNEADAAALEHDKAYDRQLDSGDNPYLKYNHADAEFQERLKEDTSFGGNLGRAVFQAKKRVLEPLGLVEEPVKTAPGKKRPVEHSPVEPDSSSGTGKAGQQPARKRLNFGQTGDADSVPDPQPLGQPPAAPTSLGSTTMATGSGAPMADNNEGADGVGNSSGNWHCDSQWLGDRVITTSTRTWALPTYNNHLYKQISSQSGASNDNHYFGHSTPWGYFDFNRFHCHFSPRDWQRLINNNWGFRPKRLNFKLFNIQVKEVTQNDGTTTIANNLTSTVQVFTDSEYQLPYVLGSAHQGCLPPFPADVFMVPQYGYLTLNNGSQAVGRSSFYCLEYFPSQMLRTGNNFTFSYTFEDVPFHSSYAHSQSLDRLMNPLIDQYLYYLNKTQSNSGTLQQSRLLFSQAGPTSMSLQAKNWLPGPCYRQQRLSKQANDNNNSNFPWTAATKYHLNGRDSLVNPGPAMASHKDDEEKFFPMHGTLIFGKQGTNANDADLDNVMITDEEEIRTTNPLATEQYGTVSNNLQNSNTGPTTGTVNHQGALPGMVWQDRDVYLQGPIWAKIPHTDGHFHPSPLMGGFGLKHPPPQIMIKNTPVPANPPTNFSSAKFASFITQYSTGQVSVEIEWELQKENSKRWNPEIQYTSNYNKSVNVDFTVDTNGVYSEPRPIGTRYLTRNL

SEQ ID NO: 4102 - protein, 735 aa, synthetic construct
  REGION 1..735: note = source = /note="Description of Artificial Sequence: Synthetic polypeptide"
MAADGYLPDWLEDTLSEGIRQWWKLKPGPPPPKPAERHKDDSRGLVLPGYKYLGPFNGLDKGEPVNEADAAALEHDKAYDRQLDSGDNPYLKYNHADAEFQERLKEDTSFGGNLGRAVFQAKKRVLEPLGLVEEPVKTAPRKKRPVEHSPVEPDSSSGTGKAGQQPARKRLNFGQTGDADSVPDPQPLGQPPAAPTSLGSTTMATGSGAPMADNNEGADGVGNSSGNWHCDSQWLGDRVITTSTRTWALPTYNNHLYKQISSQSGASNDNHYFGHSTPWGYFDFNRFHCHFSPRDWQRLINNNWGFRPKRLNFKLFNIQVKEVTQNDGTTTIANNLTSTVQVFTDSEYQLPYVLGSAHQGCLPPFPADVFMVPQYGYLTLNNGSQAVGRSSFYCLEYFPSQMLRTGNNFTFSYTFEDVPFHSSYAHSQSLDRLMNPLIDQYLYYLNKTQSNSGTLQQSRLLFSQAGPTSMSLQAKNWLPGPCYRQQRLSKQANDNNNSNFPWTAATKYHLNGRDSLVNPGPAMASHKDDEEKFFPMHGTLIFGKQGTNANDADLDNVMITDEEEIRTTNPVATEQYGTVSNNLQNSNTGPTTGTVNHQGALPGMVWQDRDVYLQGPIWAKIPHTDGHFHPSPLMGGFGLKHPPPQIMIKNTPVPANPPTNFSSAKFASFITQYSTGQVSVEIEWELQKENSKRWNPEIQYTSNYNKSVNVDFTVDTNGVYSEPRPIGTRYLTRNL

SEQ ID NO: 4103 - protein, 735 aa, synthetic construct
  REGION 1..735: note = source = /note="Description of Artificial Sequence: Synthetic polypeptide"
MAADGYLPDWLEDTLSEGIRQWWKLKPGPPPPKPAERHKDDSRGLVLPGYKYLGPFNGLDKGEPVNEADAAALEHDKAYDRQLDSGDNPYLKYNHADAEFQERLKEDTSFGGNLGRAVFQAKKRVLEPLGLVEEPVKTAPGKKRPVEHSPVEPDSSSGTGKAGQQPARKRLNFGQTGDADSVPDPQPLGQPPAAPTSLGSTTMATGSGAPMADNNEGADGVGNSSGNWHCDSQWLGDRVITTSTRTWALPTYNNHLYKQISSQSGASNDNHYFGHSTPWGYFDFNRFHCHFSPRDWQRLINNNWGFRPKRLNFKLFNIQVKEVTQNDGTTTIANNLTSTVQVFTDSEYQLPYVLGSAHQGCLPPFPADVFMVPQYGYLTLNNGSQAVGRSSFYCLEYFPSQMLRTGNNFTFSYTFEDVPFHSSYAHSQSLDRLMNPLIDQYLYYLNKTQSNSGTLQQSRLLFSQAGPTSMSLQAKNWLPGPCYRQQRLSKQANDNNNSNFPWTAATKYHLNGRDSLVNPGPAMASHKDDEEKFFPMHGTLIFGKQGTNANDADLDNVMITDEEEIRTTNPVATEQYGTVSNNLQNSNTGPTTGTVNHQGALPGMVWQDRDVYLQGPIWAKIPHTDGRFHPSPLMGGFGLKHPPPQIMIKNTPVPANPPTNFSSAKFASFITQYSTGQVSVEIEWELQKENSKRWNPEIQYTSNYNKSVNVDFTVDTNGVYSEPRPIGTRYLTRNL

SEQ ID NO: 4104 - protein, 735 aa, synthetic construct
  REGION 1..735: note = source = /note="Description of Artificial Sequence: Synthetic polypeptide"
MAADGYLPDWLEDTLSEGIRQWWKLKPGPPPPKPAERHKDDSRGLVLPGYKYLGPFNGLDKGEPVNEADAAALEHDKAYDRQLDSGDNPYLKYNHADAEFQERLKEDTSFGGNLGRAVFQAKKRVLEPLGLVEEPVKTAPGKKRPVEHSPVEPDSSSGTGKAGQQPARKRLNFGQTGDADSVPDPQPLGQPPAAPTSLGSTTMATGSGAPMADNNEGADGVGNSSGNWHCDSQWLGDRVITTSTRTWALPTYSNHLYKQISSQSGASNDNHYFGHSTPWGYFDFNRFHCHFSPRDWQRLINNNWGFRPKRLNFKLFNIQVKEVTQNDGTTTIANNLTSTVQVFTDSEYQLPYVLGSAHQGCLPPLPADVFMVPQYGYLTLNNGSQAVGRSSFYCLEYFPSQMLRTGNNFTFSYTFEDVPFHSSYAHSQSLDRLMNPLIDQYLYYLNKTQSNSGTLQQSRLLFSQAGPTSMSLQAKNWLPGPCYRQQRLSKQANDNNNSNFPWTAATKYHLNGRDSLVNPGPAMASHKDDEEKFFPMHGTLIFGKQGTNANDADLDNVMITDEEEIRTTNPVATEQYGTVSNNLQNSNTGPTTGTVNHQGALPGMVWQDRDVYLQGPIWAKIPHTDGHFHPSPLMGGFGLKHPPPQIMIKNTPVPANPPTNFSSAKFASFITQYSTGQVSVEIEWELQKENSKRWNPEIQYTSNYNKSVNVDFTVDTNGVYSEPRPIGTRYLTRNL

SEQ ID NO: 4105 - protein, 735 aa, synthetic construct
  REGION 1..735: note = source = /note="Description of Artificial Sequence: Synthetic polypeptide"
MAADGYLPDWLEDTLSEGIRQWWKLKPGPPPPKPAERHKDDSRGLVLPGYKYLGPFNGLDKGEPVNEADAAALEHDKAYDRQLDSGDNPYLKYNHADAEFQERLKEDTSFGGNLGRAVFQAKKRVLEPLGLVEEPVKTAPGKKRPVEHSPVEPDSSSGTGKAGQQPARKRLNFGQTGGADSVPDPQPLGQPPAAPTSLGSTTMATGSGAPMADNNEGADGVGNSSGNWHCDSQWLGDRVITTSTRTWALPTYNNHLYKQISSQSGASNDNHYFGHSTPWGYFDFNRFHCHFSPRDWQRLINNNWGFRPKRLNFKLFNIQVKEVTQNDGTTTIANNLTSTVQVFTDSEYQLPYVLGSAHQGCLPPFPADVFMVPQYGYLTLNNGSQAVGRSSFYCLEYFPSQMLRTGNNFTFSYTFEDVPFHSSYAHSQSLDRLMNPLIDQYLYYLNKTQSNSGTLQQSRLLFSQAGPTSMSLQAKNWLPGPCYRQQRLSKQANDNNNSNFPWTAATKYHLNGRDSLVNPGPAMASHKDDEEKFFPMHGTLIFGKQGTNANDADLDNVMITDEEEIRTTNPVATEQYGTVSNNLQNSNTGPTTGTVNHQGALPGMVWQDRDVYLQGPIWAKIPHTDGHFHPSPLMGGFGLKHPPPQIMIKNTPVPANPPTNFSSAKFASFITQYSTGQVSVEIEWELQKENSKRWNPEIQYTSNYNKSVNVDFTVDTNGVYSEPRPIGTRYLTRNL

SEQ ID NO: 4106 - protein, 735 aa, synthetic construct
  REGION 1..735: note = source = /note="Description of Artificial Sequence: Synthetic polypeptide"
MAADGYLPDWLEDTLSEGIRQWWKLKPGPPPPKPAERHKDDSRGLVLPGYKYLGPFNGLDKGEPVNEADAAALEHGKAYDRQLDSGDNPYLKYNHADAEFQERLKEDTSFGGNLGRAVFQAKKRVLEPLGLVEEPVKTAPGKKRPVEHSPVEPDSSSGTGKAGQQPARKRLNFGQTGDADSVPDPQPLGQPPAAPTSLGSTTMATGSGAPMADNNEGADGVGNSSGNWHCDSQWLGDRVITTSTRTWALPTYNNHLYKQISSQSGASNDNHYFGHSTPWGYFDFNRFHCHFSPRDWQRLINNNWGFRPKRLNFKLFNIQVKEVTQNDGTTTIANNLTSTVQVFTDSEYQLPYVLGSAHQGCLPPFPADVFMVPQYGYLTLNNGSQAVGRSSFYCLEYFPSQMLRTGNNFTFSYTFEDVPFHSSYAHSQSLDRLMNPLIDQYLYYLNKTQSNSGTLQQSRLLFSQAGPTSMSLQAKNWLPGPCYRQQRLSKQANDNNNSNFPWTAATKYHLNGRDSLVNPGPAMASHKDDEEKFFPMHGTLIFGKQGTNANDADLDNVMITDEEEIRTTNPVATEQYGTVSNNLQNSNTGPTTGTVNHQGALPGMVWQDRDVYLQGPIWAKIPHTDGHFHPSPLMGGFGLKHPPPQIMIKNTPVPANPPTNFSSAKFASFITQYSTGQVSVEIEWELQKENSKRWNPEIQYTSNYNKSVNVDFTVDTNGVYSEPRPIGTRYLTRNL

SEQ ID NO: 4107 - protein, 735 aa, synthetic construct
  REGION 1..735: note = source = /note="Description of Artificial Sequence: Synthetic polypeptide"
MAADGYLPDWLEDTLSEGIRQWWKLKPGPPPPKPAERHKDDSRGLVLPGYKYLGPFNGLDKGEPVNEADAAALEHDKAYDRQLDSGDNPYLKYNHADAEFQERLKEDTSFGGNLGRAVFQAKKRVLEPLGLVEEPVKTAPGKKRPVEHSPVEPDSSSGTGKAGQQPARKRLNFGQTGDADSVPDPQPLGQPPAAPTSLGSTTMATGSGAPMADNNEGADGVGNSSGNWHCDSQWLGDRVITTSTRTWALPTYNNHLYKQISSQSGASNDNHYFGHSTPWGYFDFNRFHCHFSPRDRQRLINNNWGFRPKRLNFKLFNIQVKEVTQNDGTTTIANNLTSTVQVFTDSEYQLPYVLGSAHQGCLPPFPADVFMVPQYGYLTLNNGSQAVGRSSFYCLEYFPSQMLRTGNNFTFSYTFEDVPFHSSYAHSQSLDRLMNPLIDQYLYYLNKTQSNSGTLQQSRLLFSQAGPTSMSLQAKNWLPGPCYRQQRLSKQANDNNNSNFPWTAATKYHLNGRDSLVNPGPAMASHKDDEEKFFPMHGTLIFGKQGTNANDADLDNVMITDEEEIRTTNPVATEQYGTVSNNLQNSNTGPTTGTVNHQGALPGMVWQDRDVYLQGPIWAKIPHTDGHFHPSPLMGGFGLKHPPPQIMIKNTPVPANPPTNFSSAKFASFITQYSTGQVSVEIEWELQKENSKRWNPEIQYTSNYNKSVNVDFTVDTNGVYSEPRPIGTRYLTRNL

SEQ ID NO: 4108 - protein, 735 aa, synthetic construct
  REGION 1..735: note = source = /note="Description of Artificial Sequence: Synthetic polypeptide"
MAADGYLPDWLEDTLSEGIRQWWKLKPGPPPPKPAERHKDDSRGLVLPGYKYLGPFNGLDKGEPVNEADAAALEHDKAYDRQLDSGDNPYLKYNHADAEFQERLKEDTSFGGNLGRAVFQAKKRVLEPLGLVEEPVKTAPGKKRPVEHSPVEPDSSSGTGKAGQQPARKRLNFGQTGDADSVPDPQPLGQPPAAPTSLGSTTMATGSGAPMADNNEGADGVGNSSGNWHCDSQWLGDRVITTSTRTWALPTYNNHLYKQISSQSGASNDNHYFGHSTPWGYFDFNRFHCHFSPRDWQRLINNNWGFRPKRPNFKLFNIQVKEVTQNDGTTTIANNLTSTVQVFTDSEYQLPYVLGSAHQGCLPPFPADVFMVPQYGYLTLNNGSQAVGRSSFYCLEYFPSQMLRTGNNFTFSYTFEDVPFHSSYAHSQSLDRLMNPLIDQYLYYLNKTQSNSGTLQQSRLLFSQAGPTSMSLQAKNWLPGPCYRQQRLSKQANDNNNSNFPWTAATKYHLNGRDSLVNPGPAMASHKDDEEKFFPMHGTLIFGKQGTNANDADLDNVMITDEEEIRTTNPVATEQYGTVSNNLQNSNTGPTTGTVNHQGALPGMVWQDRDVYLQGPIWAKIPHTDGHFHPSPLMGGFGLKHPPPQIMIKNTPVPANPPTNFSSAKFASFITQYSTGQVSVEIEWELQKENSKRWNPEIQYTSNYNKSVNVDFTVDTNGVYSEPRPIGTRYLTRNL

SEQ ID NO: 4109 - protein, 735 aa, synthetic construct
  REGION 1..735: note = source = /note="Description of Artificial Sequence: Synthetic polypeptide"
MAADGYLPDWLEDTLSEGIRQWWKLKPGPPPPKPAERHKDDSRGLVLPGYKYLGPFNGLDKGEPVNEADAAALEHDKAYDRQLDSGDNPYLKYNHADAEFQERLKEDTSFGGNLGRAVFQAKKRVLEPLGLVEEPVKTAPGKKRPVEHSPVEPDSSSGTGKAGQQPARKRLNFGQTGDADSVPDPQPLGQPPAAPTSLGSTTMATGSGAPMADNNEGADGVGNSSGNWHCDSQWLGDRVITTSTRTWALPTYNNHLYKQISSQSGASNDNHYFGHSTPWGYFDFNRFHCHFSPRDWQRLINNNWGFRPKRLNFKLFNIQVKEVTQNDGTTTIANNLTSTVQVFTDSEYQLPYVLGSAHQGCLPPFPADVFMVPQYGYLTLNNGSQAVGRSSFYCLEYFPSQMLRTGNNFTFSYTFEDVPFHSSYAHSQSLDRLMNPLIDQYLYYLNKTQSNSGTLQQSRLLFSQAGPTSMSLQAKNWLPGPCYRQQRLSKQANDNNNSNFPWTAATKYHLNGRDSLVNPGPAMASHKDDEEKFFPMHGTLIFGKQGTNANDADLDNVMITDEEEIRTTNPVATEQYGTVSNNLQNSNTGPTTGTVNHQGALPGMVWQDRDVYLQGPIWAKIPHTDGHFHPSPLMGGFGLKHPPPQIMIKNTPVPANPPTNFSSAKFASFITQYSTGQVSVEIEWELQKENSKRWNPEIQYTSNYNKSVNVDFTVGTNGVYSEPRPIGTRYLTRNL

SEQ ID NO: 4110 - protein, 735 aa, synthetic construct
  REGION 1..735: note = source = /note="Description of Artificial Sequence: Synthetic polypeptide"
MAADGYLPDWLEDTLSEGIRQWWKLKPGPPPPKPAERHKDDSRGLVLPGYKYLGPFNGLDKGEPVNEADAAALEHDKAYDRQLDSGDNPYLKYNHADAEFQERLKEDTSFGGNLGRAVFQAKKRVLEPLGLVEEPVKTAPGKKRPVEHSPVEPDSSSGTGKAGQQPARKRLNFGQTGDADSVPDPQPLGQPPAAPTSLGSTTMATGSGAPMADNNEGADGVGNSSGNWHCDSQWLGDRVITTSTRTWALPTYNNHLYKQISSQSGASNDNHYFGHSTPWGYFDFNRFHCHFSPRDWQRLINNNWGFRPKRLNFKLFNIQVKEVTQNDGTTTIANNLTSTVQVFTDSEYQLPYVLGSAHQGCLPPFPADVFMVPQYGYLTLNNGSQAVGRSSFYCLEYFPSQMLRTGNNFTFSYTFEDVPFHSSYAHSQSLDRLMNPLIDQYLYYLNKTQSNSGTLQQSRLLFSQAGPTSTSLQAKNWLPGPCYRQQRLSKQANDNNNSNFPWTAATKYHLNGRDSLVNPGPAMASHKDDEEKFFPMHGTLIFGKQGTNANDADLDNVMITDEEEIRTTNPVATEQYGTVSNNLQNSNTGPTTGTVNHQGALPGMVWQDRDVYLQGPIWAKIPHTDGHFHPSPLMGGFGLKHPPPQIMIKNTPVPANPPTNFSSAKFASFITQYSTGQVSVEIEWELQKENSKRWNPEIQYTSNYNKSVNVDFTVDTNGVYSEPRPIGTRYLTRNL

SEQ ID NO: 4111 - protein, 735 aa, synthetic construct
  REGION 1..735: note = source = /note="Description of Artificial Sequence: Synthetic polypeptide"
MAADGYLPDWLEDTLSEGIRQWWKLKPGPPPPKPAERHKDDSRGLVLPGYKYLGPFNGLDKGEPVNEADAAALEHDKAYDRQLDSGDNPYLKYNHADAEFQERLKEDTSFGGNLGRAVFQAKKRVLEPLGLVEEPVKTAPGKKRPVEHSPVEPDSSSGTGKAGQQPARKRLNFGQTGDADSVPDPQPLGQPPAAPTSLGSTTMATGSGAPMADNNEGADGVGNSSGNWHCDSQWLGDRVITTSTRTWALPTYNNHLYKQISSQSGASNDNHYFGHSTPWGYFDFNRFHCHFSPRDWQRLINNNWGFRPKRLNFKLFNIQVKEVTQNDGTTTIANNLTSTVQVFTDSEYQLPYVLGSAHQGCLPPFPADVFMVPQYGYLTLNNGSQAVGRSSFYCLEYFPSQMLRTGNNFTFSYTFEDVPFHSSYAHSQSLDRLMNPLIDQYLYYLNKTQSNSGTLQQSRLLFSQAGPTSMSLQAKNWLPGPCYRQQRLSKQANDNNNSNFPWTAATKYHLNGRDSLVNPGPAMASHKDDEEKFFPMHGTLIFGKQGTNANDADLDNVMITDEEEIRTTNPVATEQYGTVSNNLQNSNTGPTTGTINHQGALPGMVWQDRDVYLQGPIWAKIPHTDGHFHPSPLMGGFGLKHPPPQIMIKNTPVPANPPTNFSSAKFASFITQYSTGQVSVEIEWELQKENSKRWNPEIQYTSNYNKSVNVDFTVDTNGVYSEPRPIGTRYLTRNL

SEQ ID NO: 4112 - protein, 735 aa, synthetic construct
  REGION 1..735: note = source = /note="Description of Artificial Sequence: Synthetic polypeptide"
MAADGYLPDWLEDTLSEGIRQWWKLKPGPPPPKPAERHKDDSRGLVLPGYKYLGPFNGLDKGEPVNEADAAALEHDKAYDRQLDSGDNPYLKYNHADAEFQERLKEDTSFGGNLGRAVFQAKKRVLEPLGLVEEPVKTAPGKKRPVEHSPVEPDSSSGTGKAGQQPARKRLNFGQTGDADSVPDPQPLGQPPAAPTSLGSTTMATGSGAPMADNNEGADGVGNSSGNWHCDSQWLGDRVITTSTRTWALPTYNNHLYKQISSQSGASNDNHYFGHSTPWGYFDFNRFHCHFSPRDWQRLINNNWGFRPKRLNFKLFNIQVKEVTQNDGTATIANNLTSTVQVFTDSEYQLPYVLGSAHQGCLPPFPADVFMVPQYGYLTLNNGSQAVGRSSFYCLEYFPSQMLRTGNNFTFSYTFEDVPFHSSYAHSQSLDRLMNPLIDQYLYYLNKTQSNSGTLQQSRLLFSQAGPTSMSLQAKNWLPGPCYRQQRLSKQANDNNNSNFPWTAATKYHLNGRDSLVNPGPAMASHKDDEEKFFPMHGTLIFGKQGTNANDADLDNVMITDEEEIRTTNPVATEQYGTVSNNLQNSNTGPTTGTVNHQGALPGMVWQDRDVYLQGPIWAKIPHTDGHFHPSPLMGGFGLKHPPPQIMIKNTPVPANPPTNFSSAKFASFITQYSTGQVSVEIEWELQKENSKRWNPEIQYTSNYNKSVNVDFTVDTNGVYSEPRPIGTRYLTRNL

SEQ ID NO: 4113 - protein, 735 aa, synthetic construct
  REGION 1..735: note = source = /note="Description of Artificial Sequence: Synthetic polypeptide"
MAADGYLPDWLEDTLSEGIRQWWKLKPGPPPPKPAERHKDDSRGLVLPGYKYLGPFNGLDKGEPVNEADAAALEHDKAYDRQLDSGDNPYLKYNHADAEFQERLKEDTSFGGNLGRAVFQAKKRVLEPLGLVEEPVKTAPGKKRPVEHSPVEPDSSSGTGKAGQQPARKRLNFGQTGDADSVPDPQPLGQPPAAPTSLGSTTMATGSGAPMADNNEGADGVGNSSGNWHCDSQWLGDRVITTSTRTWALPTYNNHLYKQISSQSGASNDNHYFGHSTPWGYFDFNRFHCHFSPRDWQRLINNNWGFRPKRLNFKLFNIQVKEVTQNDGTTTIANNLTSTVQVFTDSEYQLPYVLGSAHQGCLPPFPADVFMVPQYGYLTLNNGSQAVGRSSFYCLEYFPSQMLRTGNNFTFSYTFEDVPFHSSYAHSQSLDRLMNPLIDQYLYYLNKTQSNSGTLQQSRLLFSQAGPTSMSLQAKNWLPGPCYRQQRLSKQANDNNNSNFPWTVATKYHLNGRDSLVNPGPAMASHKDDEEKFFPMHGTLIFGKQGTNANDADLDNVMITDEEEIRTTNPVATEQYGTVSNNLQNSNTGPTTGTVNHQGALPGMVWQDRDVYLQGPIWAKIPHTDGHFHPSPLMGGFGLKHPPPQIMIKNTPVPANPPTNFSSAKFASFITQYSTGQVSVEIEWELQKENSKRWNPEIQYTSNYNKSVNVDFTVDTNGVYSEPRPIGTRYLTRNL

SEQ ID NO: 4114 - protein, 735 aa, synthetic construct
  REGION 1..735: note = source = /note="Description of Artificial Sequence: Synthetic polypeptide"
MAADGYLPDWLEDTLSEGIRQWWKLKPGPPPPKPAERHKDDSRGLVLPGYKYLGPFNGLDKGEPVNEADAAALEHDKAYDRQLDSGDNPYLKYNHADAEFQERLKEDTSFGGNLGRAVFQAKKRVLEPLGLVEEPVKTAPGKKRPVEHSPVEPDSSSGTGKAGQQPARKRLNFGQTGDADSVPDPQPLGQPPAAPTSLGSTTMATGSGAPMADNNEGADGVGNSSGNWHCDSQWLGDRVITTSTRTWALPTYNNHLYKQISSQSGASNDNHYFGHSTPWGYFDFNRFHCHFSPRDWQRLINNNWGFRPKRLNFKLFNIQVKEVTQNDGTTTIANNLTSTVQVFTDSEYQLPYVLGSAHQGCLPPFPADVFMVPQYGYLTLNNGSQAVGRSSFYCLEYFPSQMLRTGNNFTFSYTFEDVPFHSSYAHSQSLDRLMNPLIDQYLYYLNKTQSNSGTLQQSRLLFSQAGPTSMSLQAKNWLPGPCYRQQRLSKQANDNNNSNFPWTAATKYHLNGRDSLVNPGPAMASHKDDEEKFFPMHGTLIFGKQGTNANDADLDNVMITDEEEIRTTNPVATEQYGTVSNNLQNSNTGPTTGTVNHQGALPGMVWQDRDVYLQGPIWAKIPHTDGHFHPSPLMGGFGLKHPPPQIMIKNTPVPANPPTNFSSAKFASFITQHSTGQVSVEIEWELQKENSKRWNPEIQYTSNYNKSVNVDFTVDTNGVYSEPRPIGTRYLTRNL

SEQ ID NO: 4115 - protein, 735 aa, synthetic construct
  REGION 1..735: note = source = /note="Description of Artificial Sequence: Synthetic polypeptide"
MAADGYLPDWLEDTLSEGIRQWWKLKPGPPPPKPAERHKDDGRGLVLPGYKYLGPFNGLDKGEPVNEADAAALEHDKAYDRQLDSGDNPYLKYNHADAEFQERLKEDTSFGGNLGRAVFQAKKRVLEPLGLVEEPVKTAPGKKRPVEHSPVEPDSSSGTGKAGQQPARKRLNFGQTGDADSVPDPQPLGQPPAAPTSLGSTTMATGSGAPMADNNEGADGVGNSSGNWHCDSQWLGDRVITTSTRTWALPTYNNHLYKQISSQSGASNDNHYFGYSTPWGYFDFNRFHCHFSPRDWQRLINNNWGFRPKRLNFKLFNIQVKEVTQNDGTTTIANNLTSTVQVFTDSEYQLPYVLGSAHQGCLPPFPADVFMVPQYGYLTLNNGSQAVGRSSFYCLEYFPSQMLRTGNNFTFSYTFEDVPFHSSYAHSQSLDRLMNPLIDQYLYYLNKTQSNSGTLQQSRLLFSQAGPTSMSLQAKNWLPGPCYRQQRLSKQANDNNNSNFPWTAATKYHLNGRDSLVNPGPAMASHKDDEEKFFPMHGTLIFGKQGTNANDADLDNVMITDEEEIRTTNPVATEQYGTVSNNLQNSNTGPTTGTVNHQGALPGMVWQDRDVYLQGPIWAKIPHTDGHFHPSPLMGGFGLKHPPPQIMIKNTPVPANPPTNFSSAKFASFITQYSTGQVSVEIEWELQKENSKRWNPEIQYTSNYNKSVNVDFTVDTNGVYSEPRPIGTRYLTRNL

SEQ ID NO: 4116 - protein, 735 aa, synthetic construct
  REGION 1..735: note = source = /note="Description of Artificial Sequence: Synthetic polypeptide"
MAADGYLPDWLEDTLSEGIRQWWKLKPGPPPPKPAERHKDDSRGLVLPGYKYLGPFNGLDKGEPVNEADAAALEHDKAYDRQLDSGDNPYLKYNHADAELQERLKEDTSFGGNLGRAVFQAKKRVLEPLGLVEEPVKTAPGKKRPVEHSPVEPDSSSGTGKAGQQPARKRLNFGQTGDADSVPDPQPLGQPPAAPTSLGSTTMATGSGAPMADNNEGADGVGNSSGNWHCDSQWLGDRVITTSTRTWALPTYNNHLYKQISSQSGASNDNHYFGYSTPWGYFDFNRFHCHFSPRDWQRLINNNWGFRPKRLNFKLFNIQVKEVTQNDGTTTIANNLTSTVQVFTDSEYQLPYVLGSAHQGCLPPFPADVFMVPQYGYLTLNNGSQAVGRSSFYCLEYFPSQMLRTGNNFTFSYTFEDVPFHSSYAHSQSLDRLMNPLIDQYLYYLNKTQSNSGTLQQSRLLFSQAGPTSMSLQAKNWLPGPCYRQQRLSKQANDNNNSNFPWTAATKYHLNGRDSLVNPGPAMASHKDDEEKFFPMHGTLIFGKQGTNANDADLDNVMITDEEEIRTTNPVATEQYGTVSNNLQNSNTGPTTGTVNHQGALPGMVWQDRDVYLQGPIWAKIPHTDGHFHPSPLMGGFGLKHPPPQIMIKNTPVPANPPTNFSSAKFASFITQYSTGQVSVEIEWELQKENSKRWNPEIQYTSNYNKSVNVDFTVDTNGVYSEPRPIGTRYLTRNL

SEQ ID NO: 4117 - protein, 735 aa, synthetic construct
  REGION 1..735: note = source = /note="Description of Artificial Sequence: Synthetic polypeptide"
MAADGYLPDWLEDTLSEGIRQWWKLKPGPPPPKPAERHKDDSRGLVLPGYKYLGPFNGLDKGEPVNEADAAALEHDKAYDRQLDSGDNPYLKYNHADAEFQERLKEDTSFGGNLGRAVFQAKKRVLEPLGLVEEPVKTAPGKKRPVEHSPVEPDSSSGTGKAGQQPARKRLNFGQTGDADSVPDPQPLGQPPAAPTSLGSTTMATGSGAPMADNNEGADGVGNSSGNWHCDSQWLGDRVITTSTRTWALPTYNNHLYKQISSQSGASNDNHYFGYSTPWGYFDFNRFHCHFSPRDWQRLINNNWGFRPKRLNFKLFNIQVKEVTQNDGTTTIANNLTSTVQVFTDSEYQLPYVLGSAHQGCLPPFPADVFMVPQYGYLTLNNGSQAVGRSSFYCLEYFPSQMLRTGNNFTFSYTFEDVPFHSSYAHSQSLDRLMNPLIDQYLYYLNKTQSNSGTLQQSRLLFSQAGPTSMSLQAKNWLPGPCYRQQRLSKQANDNNNSNFPWTAATKYHLNGRDSLVNPGPAMASHKDDEEKFFPMHGTLIFGKQGTNANDADLDNVMITDEEEIRTTNPVATEQYGTVSNNLQNSNTGPTTGTVNHQGALPGMVWQDRDVYLQGPIWAKIPHTDGHFHPSPLVGGFGLKHPPPQIMIKNTPVPANPPTNFSSAKFASFITQYSTGQVSVEIEWELQKENSKRWNPEIQYTSNYNKSVNVDFTVDTNGVYSEPRPIGTRYLTRNL

SEQ ID NO: 4118 - protein, 735 aa, synthetic construct
  REGION 1..735: note = source = /note="Description of Artificial Sequence: Synthetic polypeptide"
MAADGYLPDWLEDTLSEGIRQWWKLKPGPPPPKPAERHKDDSRGLVLPGYKYLGPFNGLDKGEPVNEADAAALEHDKAYDRQLDSGDNPYLKYNHADAEFQERLKEDTSFGGNLGRAVFQAKKRVLEPLGLVEEPVKTAPGKKRPVEHSPVEPDSSSGTGKAGQQPARKRLNFGQTGDADSVPDPQPLGQPPAAPTSLGSTTMATGSGAPMADNNEGADGVGNSSGNWHCDSQWLGDRVITTSTRTWALPTYNNHLYKQISSQSGASNDNHYFGYSTPWGYFDFNRFHCHFSPRDWQRLINNNWGFRPKRLNFKLFNIQVKEVTQNDGTTTIANNLTSTVQVFTDSEYQLPYVLGSAHQGCLPPFPADVFMVPQYGYLTLNNGSQAVGRSSFYCLEYFPSQMLRTGNNFTFSYTFEDVPFHSSYAHSQSLDRLMNPLIDQYLYYLNKTQSNSGTLQQSRLLFSQAGPTSMSLQAKNWLPGPCYRQQRLSKQANDNNNSNFPWTAATKYHLNGRDSLVNPGPAMASHKDDEEKFFPMHGTLIFGKQGTNANDADLDNVMITDEEEIRTTNPVATEQYGTVSNNLQNSNTGPTTGTVNHQGALPGMVWQDRDVYLQGPIWAKIPHTDGHFHPSPLMGGFGLKHPPPQIMIKNTPVPANPPTNFSSAKFASFITQYSTGQVGVEIEWELQKENSKRWNPEIQYTSNYNKSVNVDFTVDTNGVYSEPRPIGTRYLTRNL

SEQ ID NO: 4119 - protein, 735 aa, synthetic construct
  REGION 1..735: note = source = /note="Description of Artificial Sequence: Synthetic polypeptide"
MAADGYLPDWLEDTLSEGIRQWWKLKPGPPPPKPAERHKDDSRGLVLPGYKYLGPFNGLDKGEPVNEADAAALEHDKAYDRQLDSGDNPYLKYNHADAEFQERLKEDTSFGGNLGRAVFQAKKRVLEPLGLVEEPVKTAPGKKRPVEHSPVEPDSSSGTGKAGQQPARKRLNFGQTGDADSVPDPQPLGQPPAAPTSLGSTTMATGSGAPMADNNEGADGVGNSSGNWHCDSQWLGDRVITTSTRTWALPTYNNHLYKQISSQSGASNDNHYFGYSTPWGYFDFNRFHCHFSPRDWQRLINNNWGFRPKRLNFKLFNIQVKEVTQNDGTTTIANNLTSTVQVFTDSEYQPPYVLGSAHQGCLPPFPADVFMVPQYGYLTLNNGSQAVGRSSFYCLEYFPSQMLRTGNNFTFSYTFEDVPFHSSYAHSQSLDRLMNPLIDQYLYYLNKTQSNSGTLQQSRLLFSQAGPTSMSLQAKNWLPGPCYRQQRLSKQANDNNNSNFPWTAATKYHLNGRDSLVNPGPAMASHKDDEEKFFPMHGTLIFGKQGTNANDADLDNVMITDEEEIRTTNPVATEQYGTVSNNLQNSNTGPTTGTVNHQGALPGMVWQDRDVYLQGPIWAKIPHTDGHFHPSPLMGGFGLKHPPPQIMIKNTPVPANPPTNFSSAKFASFITQYSTGQVSVEIEWELQKENSKRWNPEIQYTSNYNKSVNVDFTVDTNGVYSEPRPIGTRYLTRNL

SEQ ID NO: 4120 - protein, 735 aa, synthetic construct
  REGION 1..735: note = source = /note="Description of Artificial Sequence: Synthetic polypeptide"
MAADGYLPDWLEDTLSEGIRQWWKLKPGPPPPKPAERHKDDSRGLVLPGYKYLGPFNGLDKGEPVNEADAAALEHDKAYDRQLDSGDNPYLKYNHADAEFQERLKEDTSFGGNLGRAVFQAKKRVLEPLGLVEEPVKTAPGKKRPVEHSPVEPDSSSGTGKAGQQPARKRLNFGQTGDADSVPDPQPLGQPPAAPTSLGSTTMATGSGAPMADNDEGADGVGNSSGNWHCDSQWLGDRVITTSTRTWALPTYNNHLYKQISSQSGASNDNHYFGYSTPWGYFDFNRFHCHFSPRDWQRLINNNWGFRPKRLNFKLFNIQVKEVTQNDGTTTIANNLTSTVQVFTDSEYQLPYVLGSAHQGCLPPFPADVFMVPQYGYLTLNNGSQAVGRSSFYCLEYFPSQMLRTGNNFTFSYTFEDVPFHSSYAHSQSLDRLMNPLIDQYLYYLNKTQSNSGTLQQSRLLFSQAGPTSMSLQAKNWLPGPCYRQQRLSKQANDNNNSNFPWTAATKYHLNGRDSLVNPGPAMASHKDDEEKFFPMHGTLIFGKQGTNANDADLDNVMITDEEEIRTTNPVATEQYGTVSNNLQNSNTGPTTGTVNHQGALPGMVWQDRDVYLQGPIWAKIPHTDGHFHPSPLMGGFGLKHPPPQIMIKNTPVPANPPTNFSSAKFASFITQYSTGQVSVEIEWELQKENSKRWNPEIQYTSNYNKSVNVDFTVDTNGVYSEPRPIGTRYLTRNL

SEQ ID NO: 4121 - protein, 735 aa, synthetic construct
  REGION 1..735: note = source = /note="Description of Artificial Sequence: Synthetic polypeptide"
MAADGYLPDWLEDTLSEGIRQWWKLKPGPPPPKPAERHKDDSRGLVLPGYKYLGPFNGLDKGEPVNEADAAALEHDKAYDRQLDSGDNPYLKYNHADAEFQERLKEDTSFGGNLGRAVFQAKKRVLEPLGLVEEPVKTAPGKKRPVEHSPVEPDSSSGTGKAGQQPARKRLNFGQTGDADSVPDPQPLGQPPAAPTSLGSTTMATGSGAPMADNNEGADGVGNSSGNWHCDSQWLGDRVITTSTRTWALPTYNNHLYKQISSQSGASNDNHYFGYSTPWGYFDFNRFHCHFSPRDWQRLINNNWGFRPKRLNFKLFNIQVKEVTQNDGTTTIANNLTSTVQVFTDSEYQLPYVLGSAHQGCLPPFPADVFMVPQYGYLTLNNGSQAVGRSSFYCLEYFPSQMLRTGNNFTFSYTFEDVPFHSSYAHSQSLDRLMNPLIDQYLYYLNKTQSNSGTLQQSRLLFSQAGPTSMSLQAKNWLPGPCYRQQRLPKQANDNNNSNFPWTAATKYHLNGRDSLVNPGPAMASHKDDEEKFFPMHGTLIFGKQGTNANDADLDNVMITDEEEIRTTNPVATEQYGTVSNNLQNSNTGPTTGTVNHQGALPGMVWQDRDVYLQGPIWAKIPHTDGHFHPSPLMGGFGLKHPPPQIMIKNTPVPANPPTNFSSAKFASFITQYSTGQVSVEIEWELQKENSKRWNPEIQYTSNYNKSVNVDFTVDTNGVYSEPRPIGTRYLTRNL

SEQ ID NO: 4122 - protein, 735 aa, synthetic construct
  REGION 1..735: note = source = /note="Description of Artificial Sequence: Synthetic polypeptide"
MAADGYLPDWLEDTLSEGIRQWWKLKPGPPPPKPAERHKDDSRGLVLPGYKYLGPFNGLDKGEPVNEADAAALEHDKAYDRQLDSGDNPYLKYNHADAEFQERLKEDTSFGGNLGRAVFQAKKRVLEPLGLVEEPVKTAPGKKRPVEHSPVEPDSSSGTGKAGQQPARKRLNFGQTGDADSVPDPQPLGQPPAAPTSLGSTTMATGSGAPMADNNEGADGVGNSSGNWHCDSQWLGDRVITTSTRTWALPTYNNHLYKQISSQSGASNDNHYFGYSTPWGYFDFNRFHCHFSPRDWQRLINNNWGFRPKRLNFKLFNIQVKEVTQNDGTTTIANNLTSTVQVFTDSEYQLPYVLGSAHQGCLPPFPADVFMVPQYGYLTLNNGSQAVGRSSFYCLEYFPSQMLRTGNNFTFSYTFEDVPFHSSYAHSQSLDRLMNPLIDQYLYYLNKTQSNSGTLQQSRLLFSQAGPTSMSLQAKNWLPGPCYRQQRLSKQANDNNNSNFPWTAATKYHLNGRDSLVNPGPAMASHKDDEEKFFPMHGTLIFGKQGTNANDADLDNVMITDEEEIRTTNPVATEQYGTVSNNLQNSNTGPTTGTVNHQGALPGMVWQDRDVYLQGPIWAKIPHTDGHFHPSPLMGGFGLKHPPPQIMIKNTPVPANPPTNLSSAKFASFITQYSTGQVSVEIEWELQKENSKRWNPEIQYTSNYNKSVNVDFTVDTNGVYSEPRPIGTRYLTRNL

SEQ ID NO: 4123 - protein, 735 aa, synthetic construct
  REGION 1..735: note = source = /note="Description of Artificial Sequence: Synthetic polypeptide"
MAADGYLPDWLEDTLSEGIRQWWKLKPGPPPPKPAERHKDDSRGLVLPGYKYLGPFNGLDKGEPVNEADAAALEHDKAYDRQLDSGDNPYLKYNHADAEFQERLKEDTSFGGNLGRAVFQAKKRVLEPLGLVEEPVKTAPGKKRPVEHSPVEPDSSSGTGKAGQQPARKRLNFGQTGDADSVPDPQPLGQPPAAPTSLGSTTMATGSGAPMADNNEGADGVGNSSGNWHCDSQWLGDRVITTSTRTWALPTYNNHLYKQISSQSGASNDNHYFGYSTPWGYFDFNRFHCHFSPRDWQRLINNNWGFRPKRLNFKLFNIQVKEVTQNDGTTTIANNLTSTVQVFTDSEYQLPYVLGSAHQGCLPPFPADVFMVPQYGYLTPNNGSQAVGRSSFYCLEYFPSQMLRTGNNFTFSYTFEDVPFHSSYAHSQSLDRLMNPLIDQYLYYLNKTQSNSGTLQQSRLLFSQAGPTSMSLQAKNWLPGPCYRQQRLSKQANDNNNSNFPWTAATKYHLNGRDSLVNPGPAMASHKDDEEKFFPMHGTLIFGKQGTNANDADLDNVMITDEEEIRTTNPVATEQYGTVSNNLQNSNTGPTTGTVNHQGALPGMVWQDRDVYLQGPIWAKIPHTDGHFHPSPLMGGFGLKHPPPQIMIKNTPVPANPPTNFSSAKFASFITQYSTGQVSVEIEWELQKENSKRWNPEIQYTSNYNKSVNVDFTVDTNGVYSEPRPIGTRYLTRNL

SEQ ID NO: 4124 - protein, 735 aa, synthetic construct
  REGION 1..735: note = source = /note="Description of Artificial Sequence: Synthetic polypeptide"
MAADGYLPDWLEDTLSEGIRQWWKLKPGPPPPKPAERHKDDSRGLVLPGYKYLGPFNGLDKGEPVNEADAAALEHDKAYDRQLDSGDNPYLKYNHADAEFQERLKEDTSFGGNLGRAVFQAKKRVLEPLGLVEEPVKTAPGKKRPVEHSPVEPDSSSGTGKAGQQPARKRLNFGQTGDADSVPDPQPLGQPPAAPTSLGSTTMATGSGAPMADNNEGADGVGNSSGNWHCDSQWLGDRVITTSTRTWALPTYNNHLYKQISSQSGASNDNHYFGYSTPWGYFDFNRFHCHFSPRDWQRLINNNWGFRPKRLNFKLFNIQVKEVTQNDGTTTIANNLTSTVQVFTDSEYQLPYVLGSAHQGCLPPFPADVFMVPQYGYLTLNNGSQAVGRSSFYCLEYFPSQMLRTGNNFTFSYTFEDVPFHSSYAHSQSLDRLMNPLIDQYLYYLNKTQSNSGTLRQSRLLFSQAGPTSMSLQAKNWLPGPCYRQQRLSKQANDNNNSNFPWTAATKYHLNGRDSLVNPGPAMASHKDDEGKFFPMHGTLIFGKQGTNANDADLDNVMITDEEEIRTTNPVATEQYGTVSNNLQNSNTGPTTGTVNHQGALPGMVWQDRDVYLQGPIWAKIPHTDGHFHPSPLMGGFGLKHPPPQIMIKNTPVPANPPTNFSSAKFASFITQYSTGQVSVEIEWELQKENSKRWNPEIQYTSNYNKSVNVDFTVDTNGVYSEPRPIGTRYLTRNL

SEQ ID NO: 4125 - protein, 735 aa, synthetic construct
  REGION 1..735: note = source = /note="Description of Artificial Sequence: Synthetic polypeptide"
MAADGYLPDWLEDTLSEGIRQWWKLKPGPPPPKPAERHKDDSRGLVLPGYKYLGPFNGLDKGEPVNEADAAALEHDKAYDRQLDSGDNPYLKYNHADAEFQERLKEDTSFGGNLGRAVFQAKKRVLEPLGLVEEPVKTAPGKKRPVEHSPVEPDSSSGTGKAGQQPARKRLNFGQTGDADSVPDPQPLGQPPAAPTSLGSTTMATGSGAPMADNNEGADGVGNSSGNWHCDSQWLGDRVITTSTRTWALPTYNNHLYKQISSQSGASNDNHYFGYSTPWGYFDFNRFHCHFSPRDWQRLINNNWGFRPKRLNFKLFNIQVKEVTQNDGTTTIANNLTSTVQVFTDSEYQLPYVLGSAHQGCLPPFPADVFMVPQYGYLTLNNGSQAVGRSSFYCLEYFPSQMLRTGNNFTFSYTFEDVPFHSSYAHSQSLDRLMNPLIDQYLYYLNKTQSNSGTLQQSRLLFSQAGPTSMSLQAKNWLPGPCYRQQRLSKQANDNNNSNFPWTAATKYHLNGRDSLVNPGPAMASHKDDEEKFFPMHGTLIFGKQGTNANDADLDNAMITDEEEIRTTNPVATEQYGTVSNNLQNSNTGPTTGTVNHQGALPGMVWQDRDVYLQGPIWAKIPHTDGHFHPSPLMGGFGLKHPPPQIMIKNTPVPANPPTNFSSAKFASFITQYSTGQVSVEIEWELQKENSKRWNPEIQYTSNYNKSVNVDFTVDTNGVYSEPRPIGTRYLTRNL

SEQ ID NO: 4126 - protein, 735 aa, synthetic construct
  REGION 1..735: note = source = /note="Description of Artificial Sequence: Synthetic polypeptide"
MAADGYLPDWLEDTLSEGIRQWWKLKPGPPPPKPAERHKDDSRGLVLPGYKYLGPFNGLDKGEPVNEADAAALEHDKAYDRQLDSGDNPYLKYNHADAEFQERLKEDTSFGGNLGRAVFQAKKRVLEPLGLVEEPVKTAPGKKRPVEHSPVEPDSSSGTGKAGQQPARKRLNFGQTGDADSVPDPQPLGQPPAAPTSLGSTTMATGSGAPMAGNNEGADGVGNSSGNWHCDSQWLGDRVITTSTRTWALPTYNNHLYKQISSQSGASNDNHYFGYSTPWGYFDFNRFHCHFSPRDWQRLINNNWGFRPKRLNFKLFNIQVKEVTQNDGTTTIANNLTSTVQVFTDSEYQLPYVLGSAHQGCLPPFPADVFMVPQYGYLTLNNGSQAVGRSSFYCLEYFPSQMLRTGNNFTFSYTFEDVPFHSSYAHSQSLDRLMNPLIDQYLYYLNKTQSNSGTLQQSRLLFSQAGPTSMSLQAKNWLPGPCYRQQRLSKQANDNNNSNFPWTAATKYHLNGRDSLVNPGPAMASHKDDEEKFFPMHGTLIFGKQGTNANDADLDNVMITDEEEIRTTNPVATEQYGTVSNNLQNSNTGPTTGTVNHQGALPGMVWQDRDVYLQGPIWAKIPHTDGHFHPSPLMGGFGLKHPPPQIMIKNTPVPANPPTNFSSAKFASFITQYSTGQVSVEIEWELQKENSKRWNPEIQYTSNYNKSVNVDFTVDTNGVYSEPRPIGTRYLTRNL

SEQ ID NO: 4127 - protein, 735 aa, synthetic construct
  REGION 1..735: note = source = /note="Description of Artificial Sequence: Synthetic polypeptide"
MAADGYLPDWLEDTLSEGIRQWWKLKPGPPPPKPAERHKDDSRGLVLPGYKYLGPFNGLDKGEPVNEADAAALEHDKAYDRQLDSGDNPYLKYNHADAEFQERLKEDTSFGGNLGRAVFQAKKRVLEPLGLVEEPVKTAPGKKRPVEHSPVEPDSSSGTGKAGQQPARKRLNFGQTGDADSVPDPQPLGQPPAAPTSLGSTTMATGSGAPMADNNEGADGVGNSSGNWHCDSQWLGDRVITTSTRTWALPTYNNHLYKQISSQSGASNDNHYFGYSTPWGYFDFNRFHCHFSPRDWQRLINNNWGFRPKRLNFKLFNIQVKEVAQNDGTTTIANNLTSTVQVFTDSEYQLPYVLGSAHQGCLPPFPADVFMVPQYGYLTLNNGSQAVGRSSFYCLEYFPSQMLRTGNNFTFSYTFEDVPFHSSYAHSQSLDRLMNPLIDQYLYYLNKTQSNSGTLQQSRLLFSQAGPTSMSLQAKNWLPGPCYRQQRLSKQANDNNNSNFPWTAATKYHLNGRDSLVNPGPAMASHKDDEEKFFPMHGTLIFGKQGTNANDADLDNVMITDEEEIRTTNPVATEQYGTVSNNLQNSNTGPTTGTVNHQGALPGMVWQDRDVYLQGPIWAKIPHTDGHFHPSPLMGGFGLKHPPPQIMIKNTPVPANPPTNFSSAKFASFITQYSTGQVSVEIEWELQKENSKRWNPEIQYTSNYNKSVNVDFTVDTNGVYSEPRPIGTRYLTRNL

SEQ ID NO: 4128 - protein, 735 aa, synthetic construct
  REGION 1..735: note = source = /note="Description of Artificial Sequence: Synthetic polypeptide"
MAADGYLPDWLEDTLSEGIRQWWKLKPGPPPPKPAERHKDDSRGLVLPGYKHLGPFNGLDKGEPVNEADAAALEHDKAYDRQLDSGDNPYLKYNHADAEFQERLKEDTSFGGNLGRAVFQAKKRVLEPLGLVEEPVKTAPGKKRPVEHSPVEPDSSSGTGKAGQQPARKRLNFGQTGDADSVPDPQPLGQPPAAPTSLGSTTMATGSGAPMADNNEGADGVGNSSGNWHCDSQWLGDRVITTSTRTWALPTYNNHLYKQISSQSGASNDNHYFGYSTPWGYFDFNRFHCHFSPRDWQRLINNNWGFRPKRLNFKLFNIQVKEVTQNDGTTTIANNLTSTVQVFTDSEYQLPYVLGSAHQGCLPPFPADVFMVPQYGYLTLNNGSQAVGRSSFYCLEYFPSQMLRTGNNFTFSYTFEDVPFHSSYAHSQSLDRLMNPLIDQYLYYLNKTQSNSGTLQQSRLLFSQAGPTSMSLQAKNWLPGPCYRQQRLSKQANDNNNSNFPWTAATKYHLNGRDSLVNPGPAMASHKDDEEKFFPMHGTLIFGKQGTNANDADLDNVMITDEEEIRTTNPVATEQYGTVSNNLQNSNTGPTTGTVNHQGALPGMVWQDRDVYLQGPIWAKIPHTDGHFHPSPLMGGFGLKHPPPQIMIKNTPVPANPPTNFSSAKFASFITQYSTGQVSVEIEWELQKENSKRWNPEIQYTSNYNKSVNVDFTVDTNGVYSEPRPIGTRYLTRNL

SEQ ID NO: 4129 - protein, 735 aa, synthetic construct
  REGION 1..735: note = source = /note="Description of Artificial Sequence: Synthetic polypeptide"
MAADGYLPDWPEDTLSEGIRQWWKLKPGPPPPKPAERHKDDSRGLVLPGYKYLGPFNGLDKGEPVNEADAAALEHDKAYDRQLDSGDNPYLKYNHADAEFQERLKEDTSFGGNLGRAVFQAKKRVLEPLGLVEEPVKTAPGKKRPVEHSPVEPDSSSGTGKAGQQPARKRLNFGQTGDADSVPDPQPLGQPPAAPTSLGSTTMATGSGAPMADNNEGADGVGNSSGNWHCDSQWLGDRVITTSTRTWALPTYNNHLYKQISSQSGASNDNHYFGYSTPWGYFDFNRFHCHFSPRDWQRLINNNWGFRPKRLNFKLFNIQVKEVTQNDGTTTIANNLTSTVQVFTDSEYQLPYVLGSAHQGCLPPFPADVFMVPQYGYLTLNNGSQAVGRSSFYCLEYFPSQMLRTGNNFTFSYTFEDVPFHSSYAHSQSLDRLMNPLIDQYLYYLNKTQSNSGTLQQSRLLFSQAGPTSMSLQAKNWLPGPCYRQQRLSKQANDNNNSNFPWTAATKYHLNGRDSLVNPGPAMASHKDDEEKFFPMHGTLIFGKQGTNANDADLDNVMITDEEEIRTTNPVATEQYGTVSNNLQNSNTGPTTGTVNHQGALPGMVWQDRDVYLQGPIWAKIPHTDGHFHPSPLMGGFGLKHPPPQIMIKNTPVPANPPTNFSSAKFASFITQYSTGQVSVEIEWELQKENSKRWNPEIQYTSNYNKSVNVDFTVDTNGVYSEPRPIGTRYLTRNL

SEQ ID NO: 4130 - protein, 735 aa, synthetic construct
  REGION 1..735: note = source = /note="Description of Artificial Sequence: Synthetic polypeptide"
MAADGYLPDWLEDTLSEGIRQWWKLKPGPPPPKPAERHKDDSRGLVLPGYKYLGPFNGLDKGEPVNEADAAALEHDKAYDRQLDSGDNPYLKYNHADAEFQERLKEDTSFGGNLGRAVFQAKKRVLEPLGLVEEPVKTAPGKKRPVEHSPVEPDSSSGTGKAGQQPARKRLNFGQTGDADSVPDPQPLGQPPAAPTSLGSTTMATGSGAPMADNNEGADGVGNSSGNWHCDSQWLGDRVITTSTRTWALPTYNNHLYKQISSQSGASNDNHYFGYSTPWGYFDFNRFHCHFSPRDWQRLINNNWGFRPKRLNFKLFNIQVKEVTQNDGTTTIANNLTSTVQVFTDSEYQLPYVLGSAHQGCLPPFPADVFMVPQYGYLTLNNGSQAVGRSSFYCLEYFPSQMLRTGNNFTFSYTFEDVPFHSSYAHSQSLDRLMNPLIDQYLYYLNKTQSNSGTLQQSRLLFSQAGPTSMSLQAKNWLPGPCYRQQRLSKQANDNNNSNFPWTAATKYHLNGRDSLVNPGPAMASHKDDEEKFFPMHGTLIFGKQGTNANDADLDNVMITDEEEIRTTNPVATEQYGTVSNNLQNSNTGPTTGTVNHQGALPGMVWQDRGVYLQGPIWAKIPHTDGHFHPSPLMGGFGLKHPPPQIMIKNTPVPANPPTNFSSAKFASFITQYSTGQVSVEIEWELQKENSKRWNPEIQYTSNYNKSVNVDFTVDTNGVYSEPRPIGTRYLTRNL

SEQ ID NO: 4131 - protein, 735 aa, synthetic construct
  REGION 1..735: note = source = /note="Description of Artificial Sequence: Synthetic polypeptide"
MAADGYLPDWLEDTLSEGIRQWWKLKPGPPPPKPAERHKDDSRGLVLPGYKYLGPFNGLDKGEPVNEADAAALEHDKAYDRQLDSGDNPYLKYNHADAEFQERLKEDTSFGGNLGRAVFQAKKRVLEPLGLVEEPVKTAPGKKRPVEHSPVEPDSSSGTGKAGQQPARKRLNFGQTGDADSVPDPQPLGQPPAAPTSLGSTTMATGSGAPMADNNEGADGVGNSSGNWHCDSQWLGDRVITTSTRTWALPTYNNHLYKQISSQSGASNDNHYFGYSTPWGYFDFNRFHCHFSPRDWQRLINNNWGFRPKRLNFKLFNIQVKEVTQNDGTTTIANNLTSTVQVFTDSEYQLPYVLGSAHQGCLPPFPADVFMVPQYGYLTLNNGSQAVGRSSFYCLEYFPSQMLRTGNNFTFSYTFEDVPFHSSYAHSQSLDRLMNPLIDQYLYYLNKTQSNSGTLQQSRLLFSQAGPTSMSLQAKNWLPGPCYRQQRLSKQANDNNNSNFPWTAATKYHLNGRDSLVNPGPAMASHKDDEEKFFPMHGTLIFGKQGTNANDADLDNVMITDEEEIRTTNPVATEQYGTVSNNLQNSNTGPTTGTVNHQGALPGMVWQDRDVYLQGPIWAKIPHTDGHFHPSPLMGGFGLKHPPPQIMIKNTPVPANPPTNFSSAKFASFITQYSTGQVSVEIEWELQKENSKRWNPEIQYTSNYNKSVNVDFTVGTNGVYSEPRPIGTRYLTRNL

SEQ ID NO: 4132 - protein, 735 aa, synthetic construct
  REGION 1..735: note = source = /note="Description of Artificial Sequence: Synthetic polypeptide"
MAADGYLPDWLEDTLSEGIRQWWKLKPGPPPPKPAERHQDDSRGLVLPGYKYLGPLNGLDKGEPVNEADAAALEHDKAYDRQLDSGDNPYLKYNHADAEFQERLKEDTSFGGNLGRAVFQAKKRVLEPLGLVEEPVKTAPGKKRPVEHSPAEPDSSSGTGKAGQQPARKRLNFGQTGDADSVPDPQPLGQPPAAPTSLGSTTMATGSGAPMADNNEGADGVGNSSGNWHCDSQWLGDRVITTSTRTWALPTYNNHLYKQISSQSGASNDNHYFGYSTPWGYFDFNRFHCHFSPRDWQRLINNNWGFRPKRLNFKLFNIQVKEVTQNDGTTTIANNLTSTVQVFTDSEYQLPYVLGSAHQGCLPPFPADVFMVPQYGYLTLNNGSQAVGRSSFYCLEYFPSQMLRTGNNFTFSYTFEDVPFHSSYAHSQSLDRLMNPLIDQYLYYLNRTQSNSGTLQQSRLLFSQAGPTSMSLQAKNWLPGPCYRQQRLSKQANDNNNSNFPWTAATKYHLNGRDSLVNPGPAMASHKDDEEKFFPMHGTLIFGKQGTNANDADLEHVMITDEEEIRTTNPVATEQYGNVSNNLQNSNTGPTTENVNHQGALPGMVWQDRDVYLQGPIWAKIPHTDGHFHPSPLMGGFGLKHPPPQIMIKNTPVPANPPTNFSAAKFASFITQYSTGQVSVEIEWELQKENSKRWNPEIQYTSNYNKSVNVDFTVDTNGVYSEPRPIGTRYLTRNL

SEQ ID NO: 4133 - protein, 735 aa, synthetic construct
  REGION 1..735: note = source = /note="Description of Artificial Sequence: Synthetic polypeptide"
MAADGYLPDWLEDTLSEGIRQWWKLKPGPPPPKPAERHQDDSRGLVLPGYKYLGPFNGLDKGEPVNEADAAALEHDKAYDRQLDSGDNPYLKYNHADAEFQERLKEDTSFGGNLGRAVFQAKKRVLEPLGLVEEPVKTAPGKKRPVEHSPAEPDSSSGTGKAGQQPARKRLNFGQTGDADSVPDPQPLGQPPAAPTSLGSTTMATGSGAPMADNNEGADGVGNSSGNWHCDSQWLGDRVITTSTRTWALPTYNNHLYKQISSQSGASNDNHYFGYSTPWGYFDFNRFHCHFSPRDWQRLINNNWGFRPKRLNFKLFNIQVKEVTQNDGTTTIANNLTSTIQVFTDSEYQLPYVLGSAHQGCLPPFPADVFMVPQYGYLTLNNGSQAVGRSSFYCLEYFPSQMLRTGNNFTFSYTFEDVPFHSSYAHSQSLDRLMNPLIDQYLYYLNRTQSNSGTLQQSRLLFSQAGPTSMSLQAKNWLPGPCYRQQRLSKQANDNNNSNFPWTAATKYHLNGRDSLVNPGPAMASHKDDEEKFFPMHGTLIFGKQGTNANDADLEHVMITDEEEIRTTNPVATEQYGNVSNNLQNSNTGPTTENVNHQGALPGMVWQDRDVYLQGPIWAKIPHTDGHFHPSPLMGGFGLKHPPPQIMIKNTPVPANPPTNFSAAKFASFITQYSTGQVSVEIEWELQKENSKRWNPEIQYTSNYNKSVNVDFTVDTNGVYSEPRPIGTRYLTRNL

SEQ ID NO: 4134 - protein, 735 aa, synthetic construct
  REGION 1..735: note = source = /note="Description of Artificial Sequence: Synthetic polypeptide"
MAADGYLPDWLEDTLSEGIRQWWKLKPGPPPPKPAERHQDDSRGLVLPGYKYLGPFNGLDKGEPVNEADAAALEHDKAYDRQLDSGDNPYLKYNHADAEFQERLKEDTSFGGNLGRAVFQAKKRVLEPLGLVEEPVKTAPGKKRPVGHSPAEPDSSSGTGKAGQQPARKRLNFGQTGDADSVPDPQPLGQPPAAPTSLGSTTMATGSGAPMADNNEGADGVGNSSGNWHCDSQWLGDRVITTSTRTWALPTYNNHLYKQISSQSGASNDNHYFGYSTPWGYFDFNRFHCHFSPRDWQRLINNNWGFRPKRLNFKLFNIQVKEVTQNDGTTTIANNLTSTVQVFTDSEYQLPYVLGSAHQGCLPPFPADVFMVPQYGYLTLNNGSQAVGRSSFYCLEYFPSQMLRTGNNFTFSYTFEDVPFHSSYAHSQSLDRLMNPLIDQYLYYLNRTQSNSGTLQQSRLLFSQAGPTSMSLQAKNWLPGPCYRQQRLSKQANDNNNSNFPWTAATKYHLNGRDSLVNPGPAMASHKDDEEKFFPMHGTLIFGKQGTNANDADLEHVMITDEEEIRTTNPVATEQYGNVSNNLQNSNTGPTTENVNHQGALPGMVWQDRDVYLQGPIWAKIPHTDGHFHPSPLMGGFGLKHPPPQIMIKNTPVPANPPTNFSAAKFASFITQYSTGQVSVEIEWELQKENSKRWNPEIQYTSNYNKSVNVDFTVDTNGVYSEPRPIGTRYLTRNL

SEQ ID NO: 4135 - protein, 735 aa, synthetic construct
  REGION 1..735: note = source = /note="Description of Artificial Sequence: Synthetic polypeptide"
MAADGYLPDWLEDTLSEGIRQWWKLKPGPPPPKPAERHQDDSRGLVLPGYKYLGPFNGLDKGEPVNEADAAALEHDKAYDRQLDSGDNPYLKYNHADAEFQERLKEDTSFGGNLGRAVFQAKKRVLEPLGLVEEPVKTAPGKKRPVEHSPAEPDSSSGTGKAGQQPARKRLNFGQTGDADSVPDPQPLGQPPAAPTSLGSTTMATGSGAPMADNNEGADGVGNSSGNWHCDSQWLGDRVITTSTRTWALPTYNNHLYKQISSQSGASNDNHYFGYSTPWGYFDFNRFHCHFSPRDWQRLINNNWGFRPKRLNFKLFNIQVKEVTQNDGTTTIANNLTSTVQVFTDSEYQLPYVLGSAHQGCLPPFPADVFMVPQYGYLTLNNGSQAVGRSSFYCLEYFPSQMLRTGNNFTFSYTFEDVPFHSSYAHSQSLDRLMNPLIDQYLYYLNRTQSNSGTLQQSRLLFSQAGPTSMSLQAKNWLPGPCYRQQRLSKQANDNNNSNFPWTAATKYHLNGRDSLVNPGPAMASHKDDEEKFFPMHGTLIFGKQGTNANDADLEHVMITDEEEIRTTNPVATEQYGNVSNNLQNSNTGPTTENVNHQGALPGMVWQDRDVYLQGPIWAKIPHTDGHFHPSPLMGGFGLKHPPPQIMIKNTPVPANPPTNFSAAKFASFITQYSTGQVSVEIERELQKENSKRWNPEIQYTSNYNKSVNVDFTVDTNGVYSEPRPIGTRYLTRNL

SEQ ID NO: 4136 - protein, 735 aa, synthetic construct
  REGION 1..735: note = source = /note="Description of Artificial Sequence: Synthetic polypeptide"
MAADGYLPDWLEDTLSEGIRQWWKLKPGPPPPKPAERHQDDSRGLVLPGYKYLGPFNGLDKGEPVNEADAAALEHDKAYDRQLDSGDNPYLKYNHADAEFQERLKEDTSFGGNLGRAVFQAKKRVLEPLGLVEEPVKTAPGKKRPVEHSPAEPDSSSGTGKAGQQPARKRLNFGQTGDADSVPDPQPLGQPPAAPTSLGSTTMATGSGAPMADNNEGADGVGNSSGNWHCDSQWLGDRVITTSTRTWALPTYNNHLYKQISSQSGASNDNHYFGYSTPWGYFDFNRFHCHFSPRDWQRLINNNWGFRPKRLNFKLFNIQVKEVTQNDGTTTIANNLTSTVQVFTDSEYQLPYVLGSAHQGCLPPFPADVFMVPQYGYLTLNNGSQAVGRSSFYCLEYFPSQMLRTGNNFTFSYTFEDVPFHSSYAHSQSLDRLMNPLIDQYLYYLNRTQSNSGTLQQSRLLFSQAGPTSMSLQAKNWLPGPCYRQQRLSKQANDNNNSNFPWTAATKYHLNGRDSLVNPGPAMASHKDDEEKFFPMHGTLIFGKQGTNANDADLEHVMITDEEEIRTTNPVATEQYGNVSNNLQNSNTGPTTENVNHQGALPGMVWQDRDVYLQGPIWAKIPHTDGHFHPSPLMGGFGLKHPPPQIMIKNTPVPANPPTNFSAAKFASFITQYSTGQVSVEIEWELQKENSKRWNPEIQYTSNYNKSVNVDLTVDTNGVYSEPRPIGTRYLTRNL

SEQ ID NO: 4137 - protein, 735 aa, synthetic construct
  REGION 1..735: note = source = /note="Description of Artificial Sequence: Synthetic polypeptide"
MAADGYLPDWLEDTLSEGIRQWWKLKPGPPPPKPAERHKDDSRGLVLPGYKYLGPFNGLDKGEPVNEADAAALEHDKAYDRQLDSGDNPYLKYNHADAEFQERLKEDTSFGGNLGRAVFQAKKRVLEPLGLVEEPVKTAPGKKRPVEHSPVEPDSSSGTGKAGQQPARKRLNFGQTGDADSVPDPQPLGQPPAAPTSLGSTTMATGSGAPMADNNEGADGVGNSSGNWHCDSQWLGDRVITTSTRTWALPTYNNHLYKQISSQSGASNDNHYFGHSTPWGYFDFNRFHCHFSPRDWQRLINNNWGFRPKRLNFKLFNIQVKEVTQNDGTTTIANNLTSTVQVFTDSEYQLPYVLGSAHQGCLPPFPADVFMVPQYGYLTLNNGSQAVGRSSFYCLEYFPSQMLRTGNNFTFSYTFEDVPFHSSYAHSQSLDRLMNPLIDQYLYYLNKTQSNSGTLQQSRLLFSQAGPTSMSLQAKNWLPGPCYRQQRLSKQANDNNNSNFPWTAATKYHLNGRDSLVNPGPAMASHKDDEEKFFPMHGTLIFGKQGTNANDADLDNVMITDEEEIRTTNPVATEQYGTVSNNLQNSNTGPTTGTVNHQGALPGMVWQDRDVYLQGPIWAKIPHTDGHFHPSPLMGGFGLKHPPPQIMIKNTPVPANPPTNFSSAKFASFITQYSTGQVSVEIEWELQKENSKRWNPEIQYTSNYNKSVNVDFTVDTNGVYSEPRPIGTRYLTRNL

SEQ ID NO: 4138 - protein, 735 aa, synthetic construct
  REGION 1..735: note = source = /note="Description of Artificial Sequence: Synthetic polypeptide"
MAADGYLPDWLEDTLSEGIRQWWKLKPGPPPPKPAERHKDDSRGLVLPGYKYLGPFNGLDKGEPVNEADAAALEHDKAYDRQLDSGDNPYLKYNHADAEFQERLKEDTSFGGNLGRAVFQAKKRVLEPLGLVEEPVKTAPGKKRPVEHSPVEPDSSSGTGKAGQQPARKRLNFGQTGDADSVPDPQPLGQPPAAPTSLGSTTMATGSGAPMADNNEGADGVGNSSGNWHCDSQWLGDRVITTSTRTWALPTYNNHLYKQISSQSGAPNDNHYFGHSTPWGYFDFNRFHCHFSPRDWQRLINNNWGFRPKRLNFKLFNIQVKEVTQNDGTTTIANNLTSTVQVFTDSEYQLPYVLGSAHQGCLPPFPADVFMVPQYGYLTLNNGSQAVGRSSFYCLEYFPSQMLRTGNNFTFSYTFEDVPFHSSYAHSQSLDRLMNPLIDQYLYYLNKTQSNSGTLQQSRLLFSQAGPTSMSLQAKNWLPGPCYRQQRLSKQANDNNNSNFPWTAATKYHLNGRDSLVNPGPAMASHKDDEEKFFPMHGTLIFGKQGTNANDADLDNVMITDEEEIRTTNPVATEQYGTVSNNLQNSNTGPTTGTVNHQGALPGMVWQDRDVYLQGPIWAKIPHTDGHFHPSPLMGGFGLKHPPPQIMIKNTPVPANPPTNFSSAKFASFITQYSTGQVSVEIEWELQKENSKRWNPEIQYTSNYNKSVNVDFTVDTNGVYSEPRPIGTRYLTRNL

SEQ ID NO: 4139 - protein, 735 aa, synthetic construct
  REGION 1..735: note = source = /note="Description of Artificial Sequence: Synthetic polypeptide"
MAADGYLPDWLEDTLSEGIRQWWKLKPGPPPPKPAERHKDDSRGLVLPGYKYLGPFNGLDKGEPVNEADAAALEHDKAYDRQLDSGDNPYLKYNHADAEFQERLKEDTSFGGNLGRAVFQAKKRVLEPLGLVEEPVKTAPGKKRPVEHSPVEPDSSSGTGKAGQQPARKRLNFGQTGDADSVPDPQPLGQPPAAPTSLGSTTMATGSGAPMADNNEGADGVGNSSGNWHCDSQWLGDRVITTSTRTWALPTYNNHLYKQISSQSGASNDNHYFGHSTPWGYFDFNRFHCHFSPRDWQRLINNNWGFRPKRLNFKLFNIQVKEVTQNDGTTTIANNLTSTVQVFTDSEYQLPYVLGSAHQGCLPPFPADVFMVPQYGYLTLNNGSQAVGRSSFYCLEYFPSQMLRTGNNFTFSYTFEDVPFHSSYAHSQSLDRLMNPLIDQYLYYLNKTQSNSGTLQQSRLLFSQAGPTSMSLQAKNWLPGPCYRQQRLSKQANDNNNSNFPWTAATKYHLNGRDSLVNPGPAMASHKDDEEKFFPMHGTLIFGKQGTNANDADLDNVMITDEEEIRTTNPVATEQYGTVSNNLQNSNTGPTTGTVNHQGALPGMVWQDRDVYLQGPIWAKIPHTDGHFHPSPLMGGFGLKHPPPQIMIKNTPVPANPPTNFSSAKFASFITQYSTGQVGVEIEWELQKENSKRWNPEIQYTSNYNKSVNVDFTVDTNGVYSEPRPIGTRYLTRNL

SEQ ID NO: 4140 - protein, 735 aa, synthetic construct
  REGION 1..735: note = source = /note="Description of Artificial Sequence: Synthetic polypeptide"
MAADGYLPDWLEDTLSEGIRQWWKLKPGPPPPKPAERHKDDSRGLVLPGYKYLGPFNGLDKGEPVNEADAAALEHDKAYDRQLDSGDNPYLKYNHADAEFQERLKEDTSFGGNLGRAVFQAKKRVLEPLGLVEEPVKTAPGKKRPVEHSPVEPDSSSGTGKAGQQPARKRLNFGQTGDADSVPDPQPLGQPPAAPTSLGSTTMATGSGAPMADNNEGADGVGNSSGNWHCDSQWLGDRVITTSTRTWALPTYNNHLYKQISSQSGASNDNHYFGHSTPWGYFDFNRFHCHFSPRDWQRLINNNWGFRPKRLNFKLFNIQVKEVTQNDGTTTIANNLTSTVQVFTDSEYQLPYVLGSAHQGCLPPFPADVFMVPQYGYLTLNNGSQAVGRSSFYCLEYFPSQMLRTGNNFTFSYTFEDVPFHSSYAHSQSLDRLMNPLIDQYLYYLNKTNNQSGTFTQSRLLFSQAGPTSILFKSKNWLPGPCYRQQRLSKRANDNNNSNFPWTAATKYHLNGRDSLVNPGPAMASHKDDEEKFFPQHGTLIFGKQGTKLTDADLDNVMITDEEEIRTTNPVATEQYGTVSNNLQKLNILATTGTVNTQGALPGMVWQDRDVYLQGPIWAKIPHTDGHFHPSPLMGGFGLKHPPPQIMIKNTPVPANPPTNFSSAKFASFITQYSTGQVSVEIEWELQKENSKRWNPEIQYTSNYNKSVNVDFTVDTNGVYSEPRPIGTRYLTRNL

SEQ ID NO: 4141 - protein, 735 aa, synthetic construct
  REGION 1..735: note = source = /note="Description of Artificial Sequence: Synthetic polypeptide"
MAADGYLPDWLEDTLSEGIRQWWKLKPGPPPPKPAERHKDASRGLVLPGYKYLGPFNGLDKGEPVNEADAAALEHDKAYDRQLDSGDNPYLKYNHADAEFQERLKEDTSFGGNLGRAVFQAKKRVLEPLGLVEEPVKTAPGKKRPVEHSPVEPDSSSGTGKAGQQPARKRLNFGQTGDADSVPDPQPLGQPPAAPTSLGSTTMATGSGAPMADNNEGADGVGNSSGNWHCDSQWLGDRVITTSTRTWALPTYNNHLYKQISSQSGASNDNHYFGYSTPWGYFDFNRFHCHFSPRDWQRLINNNWGFRPKRLNFKLFNIQVKEVTQNDGTTTIANNLTSTVQVFTDSEYQLPYVLGSAHQGCLPPFPADVFMVPQYGYLTLNNGSQAVGRSSFYCLEYFPSQMLRTGNNFTFSYTFEDVPFHSSYAHSQSLDRLMNPLIDQYLYYLNKTNNQSGTFTQSRLLFSQAGPTSILFKSKNWLPGPCYRQQRLSKTANDNNNSNFPWTAATKYHLNGRDSLVNPGPAMASHKDDEEKFFPQHGTLIFGKQGTKLTDADLDNVMITDEEEIRTTNPVATEQYGTVSNNLQKLNILATTGTVNTQGALPGMVWQDRDVYLQGPIWAKIPHTDGHFHPSPLMGGFGLKHPPPQIMIKNTPVPANPPTNFSSAKFASFITQYSTGQVSVEIEWELQKENSKRWNPEIQYTSNYNKSVNVDFTVDTNGVYSEPRPIGTRYLTRNL

SEQ ID NO: 4142 - protein, 735 aa, synthetic construct
  REGION 1..735: note = source = /note="Description of Artificial Sequence: Synthetic polypeptide"
MAADGYLPDWLEDTLSEGIRQWWKLKPGPPPPKPAERHKDDSRGLVLPGYKYLGPFNGLDKGEPVNEADAAALEHDKAYDRQLDSGDNPYLKYNHADAEFQERLKEDTSFGGNLGRAVFQAKKRVLEPLGLVEEPVKTAPGKKRPVEHSPVEPDSSSGTGKAGQQPARKRLNFGQTGDADSVPDPQPLGQPPAAPTSLGSTTMATGSGAPMADNNEGADGVGNSSGNWHCDSQWLGDRVITTSTRTWALPTYNNHLYKQISSQSGASNDNHYFGHSTPWGYFDFNRFHCHFSPRDWQRLINNNWGFRPKRLNFKLFNIQVKEVTQNDGTTTIANNLTSTVQVFTDSEYQLPYVLGSAHQGCLPPFPADVFMVPQYGYLTLNNGSQAVGRSSFYCLEYFPSQMLRTGNNFTFSYTFEDVPFHSSYAHSQSLDRLMNPLIDQYLYYLNKTNNQSGTFTQSRLLFSQAGPTSILFKSKNWLPGPCYRQQRLSKTANDNNNSNFPWTAATKYHLNGRDSLVNPGPAMASHKDDEEKFFPQHGTLIFGKQGTKLTDADLDNVMITDEEEIRTTNPVATEQYGTVSNNLQKLNILATTGTVNTQGALPGMVWQDRDVYLQGPIWAKIPHTDGHFHPSPLMGGFGLKHPPPQIMIKNTPVPANPPTNFSSAKFASFITQYSTGQVSVEIEWELQKENSKRWNPEIQYTSNYNKSVNVDFTVDTNGVYSEPRPIGTRYLTRNL

SEQ ID NO: 4143 - protein, 735 aa, synthetic construct
  REGION 1..735: note = source = /note="Description of Artificial Sequence: Synthetic polypeptide"
MAADGYLPDWLEDTLSEGIRQWWKLKPGPPPPKPAERHQDDSRGLVLPGYKYLGPFNGLDKGEPVNEADAAALEHDKAYDRQLDSGDNPYLKYNHADAEFQERLKEDTSFGGNLGRAVFQAKKRVLEPLGLVEEPVKTAPGKKRPVEHSPAEPDSSSGTGKAGQQPARKRLNFGQTGDADSVPDPQPLGQPPAAPTSLGSTTMATGSGAPMADNNEGADGVGNSSGNWHCDSQWLGDGVITTSTRTWALPTYNNHLYKQISSQSGASNDNHYFGYSTPWGYFDFNRFHCHFSPRDWQRLINNNWGFRPKRLNFKLFNIQVKEVTQNDGTTTIANNLTSTVQVFTDSEYQLPYVLGSAHQGCLPPFPADVFMVPQYGYLTLNNGSQAVGRSSFYCLEYFPSQMLRTGNNFTFSYTFEDVPFHSSYAHSQSLDRLMNPLIDQYLYYLNRTQSNSGTLQQSRLLFSQAGPTSMSLQAKNWLPGPCYRQQRLSKQANDNNNSNFPWTAATKYHLNGRDSLVNPGPAMASHKDDEEKFFPMHGTLIFGKQGTNANDADLEHVMITDEEEIRTTNPVATEQYGNVSNNLQNSNTGPTTENVNHQGALPGMVWQDRDVYLQGPIWAKIPHTDGHFHPSPLMGGFGLKHPPPQIMIKNTPVPANPPTNFSAAKFASFITQYSTGQVSVEIEWELQKENSKRWNPEIQYTSNYNKSVNVDFTVDTNGVYSEPRPIGTRYLTRNL

SEQ ID NO: 4144 - protein, 735 aa, synthetic construct
  REGION 1..735: note = source = /note="Description of Artificial Sequence: Synthetic polypeptide"
MAADGYLPDWLEDTLSEGIRQWWKLKPGPPPPKPAERHQDDSRGLVLPGYKYLGPFNGLDKGEPVNEADAAALEHDKAYDRQLDSGDNPYLKYNHADAEFQERLKEDTSFGGNLGRAVFQAKKRVLEPLGLVEEPVKTAPGKKRPVEHSPAEPDSSSGTGKAGQQPARKRLNFGQTGDADSVPDPQPLGQPPAAPTSLGSTTMATGSGAPMADNNEGADGVGNSSGNWHCDSQWLGDRVITTSTRTWALPTYNNHLYKQISSQSGASNDNHYFGYSTPWGYFDFNRFHCHFSPRDWQRLINNNWGFRPKRLNFKLFNIQVKEVTQNDGTTTIANNLTSTVQAFTDSEYQLPYVLGSAHQGCLPPFPADVFMVPQYGYLTLNNGSQAVGRSSFYCLEYFPSQMLRTGNNFTFSYTFEDVPFHSSYAHSQSLDRLMNPLIDQYLYYLNRTQSNSGTLQQSRLLFSQAGPTSMSLQAKNWLPGPCYRQQRLSKQANDNNNSNFPWTAATKYHLNGRDSLVNPGPAMASHKDDEEKFFPMHGTLIFGKQGTNANDADLEHVMITDEEEIRTTNPVATEQYGNVSNNLQNSNTGPTTENVNHQGALPGMVWQDRDVYLQGPIWAKIPHTDGHFHPSPLMGGFGLKHPPPQIMIKNTPVPANPPTNFSAAKFASFITQYSTGQVSVEIEWELQKENSKRWNPEIQYTSNYNKSVNVDFTVDTNGVYSEPRPIGTRYLTRNL

SEQ ID NO: 4145 - protein, 735 aa, synthetic construct
  REGION 1..735: note = source = /note="Description of Artificial Sequence: Synthetic polypeptide"
MAADGYLPDWLEDTLSEGIRQWWKLKPGPPPPKPAERHQDDSRGLVLPGYKYLGPFNGLDKGEPVNEADAAALEHDKAYDRQLDSGDNPYLKYNHADAEFQERLKEDTSFGGNLGRAVFQAKKRVLEPLGLVEEPVKTAPGKKRPVEHSPAEPDSSSGTGKAGQQPARKRLNFGQTGDADSVPDPQPLGQPPAAPTSLGSTTMATGSGAPMADNNEGADGVGNSSGNWHCDSQWLGDRVITTSTRTWALPTYNNHLYKQISSQSGASNDNHYFGYSTPWGYFDFNRFHCHFSPRDWQRLINNNWGFRPKRLNFKLFNIQVKEVTQNDGTTTIANNLTSTVQVFTDSEYQLPYVLGSAHQGCLPPFPADVFMVPQYGYLTLNNGSQAVGRSSFYCLEYFPSQMLRTGNNFTFSYTFEDVPFHSSYAHSQSLDRLMNPLIDQYLYYLNRTQSNSGTLQQSRLLFSQAGPTSMSLQAKNWLPGPCYRQQRLSKQANDNNNSNFPWTAATKYHLNGRDSLVNPGPAMASHKDDEEKFFPMHGTLIFGKQGTNANDADLEHVMITDEEEIRTTNPVATEQYGNVSNNLQNSNTGPTTENVNHQGALPGMVWQDRDVYLQGPIWAKIPHTDGHFHPSPLMGGFGLKHPPPQIMIKNTPVPANPPTNFSAAKFASFITQYSTGQVSVEIEWELQKGNSKRWNPEIQYTSNYNKSVNVDFTVDTNGVYSEPRPIGTRYLTRNL

SEQ ID NO: 4146 - protein, 735 aa, synthetic construct
  REGION 1..735: note = source = /note="Description of Artificial Sequence: Synthetic polypeptide"
MAADGYLPDWLEDTLSEGIRQWWKLKPGPPPPKPAERHQDDSRGLVLPGYKYLGPFNGLDKGEPVNEADAAALEHDKAYDRQLDSGDNPYLKYNHADAEFQERLKEDTSFGGNLGRAVFQAKKRVLEPLGLVEEPVKTAPGKKRPVEHSPAEPDSSSGTGKAGQQPARKRLNFGQTGDADSVPDPQPLGQPPAAPTSLGSTTMATGSGAPMADNNEGADGVGNSSGNWHCDSQWLGDRVITTSTRTWALPTYNNHLYKQISSQSGASNDNHYFGYSTPWGYFDFNRFHCHFSPRDWQRLINNNWGFRPKRLNFKLFNIQVKEVTQNDGTTTIANNLTSTVQVFTDSEYQLPYVLGSAHQGCLPPFPADVFMVPQYGYLTLNNGSQAVGRSSFYCLEYFPSQMLRTGNNFTFSYTFEDVPFHSSYAHSQSLDRLMNPLIDQYLYYLNRTQSNSGTLQQSRLLFSQAGPTSMSLQAKNWLPGPCYRQQRLSKQANDNNNSNFPWTAATKYHLNGRDSLVNPGPAMASHKDDEEKFFPMHGTLIFGKQGTNANDADLEHVMITDEEEIRTTNPVATEQYGNVSNNLQNSNTGPTTENVNHQGALPGMVWQDRDVYLQGPIWAKIPHTDGHFHPSPLMGGFGLKHPPPQIMIKNTPVPANPPTNFSAAKFASFITQYSTGQVSVEIEWGLQKENSKRWNPEIQYTSNYNKSVNVDFTVDTNGVYSEPRPIGTRYLTRNL

SEQ ID NO: 4147 - protein, 735 aa, synthetic construct
  REGION 1..735: note = source = /note="Description of Artificial Sequence: Synthetic polypeptide"
MAADGYLPDWLEDTLSEGIRQWWKLKPGPPPPKPAERHQDDSRGLVLPGYKYLGPFNGLDKGEPVNEADAAALEHDKAYDRQLDSGDNPYLKYNHADAEFQERLKEDTSFGGNLGRAVFQAKKRVLEPLGLVEEPVKTAPGKKRPVEHSPAEPDSSSGTGKAGQQPARKRLNFGQTGDADSVPDPQPLGQPPAAPTSLGSTTMATGSGAPMADNNEGADGVGNSSGNWHCDSQWLGDRVITTSTRTWALPTYNNHLYKQISSQSGASNDNHYFGYSTPWGYFDFNRFHCHFSPRDWQRLINNNWGFRPKRLNFKLFNIQVKEVTQNDGTTTIANNLTSTVQVFTDSEYQLPYVLGSAHQGCLPPFPADVFMVPQYGYLTLNNGSQAVGRSSFYCLEYFPSQMLRTGNNFTFSYTFEDVPFHSSYAHSQSLDRLMNPLIDQYLYYLNRTRSNSGTLQQSRLLFSQAGPTSMSLQAKNWLPGPCYRQQRLSKQANDNNNSNFPWTAATKYHLNGRDSLVNPGPAMASHKDDEEKFFPMHGTLIFGKQGTNANDADLEHVMITDEEEIRTTNPVATEQYGNVSNNLQNSNTGPTTENVNHQGALPGMVWQDRDVYLQGPIWAKIPHTDGHFHPSPLMGGFGLKHPPPQIMIKNTPVPANPPTNFSAAKFASFITQYSTGQVSVEIEWELQKENSKRWNPEIQYTSNYNKSVNVDFTVDTNGVYSEPRPIGTRYLTRNL

SEQ ID NO: 4148 - protein, 735 aa, synthetic construct
  REGION 1..735: note = source = /note="Description of Artificial Sequence: Synthetic polypeptide"
MAADGYLPDWLEDTLSEGIRQWWKLKPGPPPPKPAERHQDDSRGLVLPGYKYLGPFNGLDKGEPVNEADAAALEHDKAYDRQLDSGDNPYLKYNHADAEFQERLKEDTSFGGNLGRAVFQAKKRVLEPLGLVEEPVKTAPGKKRPVEHSPAEPDSSSGTGKAGQQPARKRLNFGQTGDADSVPDPQPLGQPPAAPTSLGSTTMATGSGAPMADNNEGADGVGNSSGNWHCDSQWLGDRVITTSTRTWALPTYNNHLYKQISSQSGASNDNHYFGYSTPWGYFDFNRFHCHFSPRDWQRLINNNWGFRPKRLNFKLFNIQVKEVTQNDGTTTIANNLTSTVQVFTDSEYQLPYVLGSAHQGCLPPFPADVFMVPQYGYLTLNNGSQAVGRSSFYCLEYFPSQMLRTGNNFTFSYTFEDVPFHSSYAHSQSLDRLMNPLIDQYLYYLNRTQSNSGTLQQSRLLFSQAGPTSMSLQAKNWLPGPCYRQQRLSKQANDNNNSNFPWTAATKYHLNGRDSLVNPGPAMASHKDDEEKFFPMHGTLIFGKQGTNANDADLEHVMITDEEEIRTTNPVATEQYGNVSNNLQNSNTGPTTENVNHQGALPGMVWQDRGVYLQGPIWAKIPHTDGHFHPSPLMGGFGLKHPPPQIMIKNTPVPANPPTNFSAAKFASFITQYSTGQVSVEIEWELQKENSKRWNPEIQYTSNYNKSVNVDFTVDTNGVYSEPRPIGTRYLTRNL

SEQ ID NO: 4149 - protein, 735 aa, synthetic construct
  REGION 1..735: note = source = /note="Description of Artificial Sequence: Synthetic polypeptide"
MAADGYLPDWLEDTLSEGIRQWWKLKPGPPPPKPAERHQDDSRGLVLPGYKYLGPFNGLDKGEPVNEADAAALEHDKAYDRQLDSGDNPYLKYNHADAEFQERLKEDTSFGGNLGRAVFQAKKRVLEPLGLVEEPVKTAPGKKRPVEHSPAEPDSSSGTGKAGQQPARKRLNFGQTGDADSVPDPQPLGQPPAAPTSLGSTTMATGSGAPMADNNEGADGVGNSSGNWHCDSQWLGDRVITTSTRTWALPTYNNHLYKQISSQSGASNDNHYFGYSTPWGYFDFNRFHCHFSPRDWQRLINNNWGFRPKRLNFKLFNIQVKEVTQNGGTTTIANNLTSTVQVFTDSEYQLPYVLGSAHQGCLPPFPADVFMVPQYGYLTLNNGSQAVGRSSFYCLEYFPSQMLRTGNNFTFSYTFEDVPFHSSYAHSQSLDRLMNPLIDQYLYYLNRTQSNSGTLQQSRLLFSQAGPTSMSLQAKNWLPGPCYRQQRLSKQANDNNNSNFPWTAATKYHLNGRDSLVNPGPAMASHKDDEEKFFPMHGTLIFGKQGTNANDADLEHVMITDEEEIRTTNPVATEQYGNVSNNLQNSNTGPTTENVNHQGALPGMVWQDRDVYLQGPIWAKIPHTDGHFHPSPLMGGFGLKHPPPQIMIKNTPVPANPPTNFSAAKFASFITQYSTGQVSVEIEWELQKENSKRWNPEIQYTSNYNKSVNVDFTVDTNGVYSEPRPIGTRYLTRNL

SEQ ID NO: 4150 - protein, 735 aa, synthetic construct
  REGION 1..735: note = source = /note="Description of Artificial Sequence: Synthetic polypeptide"
MAADGYLPDWLEDTLSEGIRQWWKLKPGPPPPKPAERHQDDSRGLVLPGYKYLGPFNGLDKGEPVNEADAAALEHDKAYDRQLDSGDNPYLKYNHADAEFQERLKEDTSFGGNLGRAVFQAKKRVLEPLGLVEEPVKTAPGKKRPVEHSPAEPDSSSGTGKAGQQPARKRLNFGQTGDADSVPDPQPLGQPPAAPTSLGSTTMATGSGAPMADNNEGADGVGNSSGNWHCDSQWLGDRVITTSTRTWALPTYNNHLYKQISSQSGASNDNHYFGYSTPWGYFDFNRFHCHFSPRDWQRLINNNWGFRPKRLNFKLFNIQVKEVTQNDGTTTIANNLTSTVQVFTDSEYQLPYVLGSAHQGCLPPFPADVFMVPQYGYLTLNNGSQAVGRSSFYCLEYFPSQMLRTGNNFTFSYTFEDVPFHSSYAHSQSLDRLMNPLIDQYLYYLNRTQSNSGTLQQSRLLFSQAGPTSMSLQAKNWLPGPCYRQQRLSKQANDNNNSNFPWTAATKYHLNGRDSLVNPGPAMASHKDDEEKFFPMHGTLIFGKQGTNANDADLEHVMITDEEEIRTTNPVATEQYGNVSNNLQNSNTGPTTENVNHQGALPGMVWQDRDVYLQGPIWAKIPHTDGHFHPSPLMGGFGLKHPPPQIMIKNTPVPANPPTNFSAAKFASFITQYSTGQVSVEIEWELRKENSKRWNPEIQYTSNYNKSVNVDFTVDTNGVYSEPRPIGTRYLTRNL

SEQ ID NO: 4151 - protein, 735 aa, synthetic construct
  REGION 1..735: note = source = /note="Description of Artificial Sequence: Synthetic polypeptide"
MAADGYLPDWLEDTLSEGIRQWWKLKPGPPPPKPAERHQDDSRGLVLPGYKYLGPFNGLDKGEPVNEADAAALEHDKAYDRQLDSGDNPYLKYNHADAEFQERLKEDTSFGGNLGRAVFQAKRRVLEPLGLVEEPVKTAPGKKRPVEHSPAEPDSSSGTGKAGQQPARKRLNFGQTGDADSVPDPQPLGQPPAAPTSLGSTTMATGSGAPMADNNEGADGVGNSSGNWHCDSQWLGDRVITTSTRTWALPTYNNHLYKQISSQSGASNDNHYFGYSTPWGYFDFNRFHCHFSPRDWQRLINNNWGFRPKRLNFKLFNIQVKEVTQNDGTTTIANNLTSTVQVFTDSEYQLPYVLGSAHQGCLPPFPADVFMVPQYGYLTLNNGSQAVGRSSFYCLEYFPSQMLRTGNNFTFSYTFEDVPFHSSYAHSQSLDRLMNPLIDQYLYYLNRTQSNSGTLQQSRLLFSQAGPTSMSLQAKNWLPGPCYRQQRLSKQANDNNNSNFPWTAATKYHLNGRDSLVNPGPAMASHKDDEEKFFPMHGTLIFGKQGTNANDADLEHVMITDEEEIRTTNPVATEQYGNVSNNLQNSNTGPTTENVNHQGALPGMVWQDRDVYLQGPIWAKIPHTDGHFHPSPLMGGFGLKHPPPQIMIKNTPVPANPPTNFSAAKFASFITQYSTGQVSVEIEWELQKENSKRWNPEIQYTSNYNKSVNVDFTVDTNGVYSEPRPIGTRYLTRNL

SEQ ID NO: 4152 - protein, 735 aa, synthetic construct
  REGION 1..735: note = source = /note="Description of Artificial Sequence: Synthetic polypeptide"
MAADGYLPDWLEDTLSEGIRQWWKLKPGPPPPKPAERHQDDSRGLVLPGYKYLGPFNGLDKGEPVNEADAAALEHDKAYDRQLDSGDNPYLKYNHADAELQERLKEDTSFGGNLGRAVFQAKKRVLEPLGLVEEPVKTAPGKKRPVEHSPAEPDSSSGTGKAGQQPARKRLNFGQTGDADSVPDPQPLGQPPAAPTSLGSTTMATGSGAPMADNNEGADGVGNSSGNWHCDSQWLGDRVITTSTRTWALPTYNNHLYKQISSQSGASNDNHYFGYSTPWGYFDFNRFHCHFSPRDWQRLINNNWGFRPKRLNFKLFNIQVKEVTQNDGTTTIANNLTSTVQVFTDSEYQLPYVLGSAHQGCLPPFPADVFMVPQYGYLTLNNGSQAVGRSSFYCLEYFPSQMLRTGNNFTFSYTFEDVPFHSSYAHSQSLDRLMNPLIDQYLYYLNRTQSNSGTLQQSRLLFSQAGPTSMSLQAKNWLPGPCYRQQRLSKQANDNNNSNFPWTAATKYHLNGRDSLVNPGPAMASHKDDEEKFFPMHGTLIFGKQGTNANDADLEHVMITDEEEIRTTNPVATEQYGNVSNNLQNSNTGPTTENVNHQGALPGMVWQDRDVYLQGPIWAKIPHTDGHFHPSPLMGGFGLKHPPPQIMIKNTPVPANPPTNFSAAKFASFITQYSTGQVSVEIEWELQKENSKRWNPEIQYTSNYNKSVNVDFTVDTNGVYSEPRPIGTRYLTRNL

SEQ ID NO: 4153 - protein, 735 aa, synthetic construct
  REGION 1..735: note = source = /note="Description of Artificial Sequence: Synthetic polypeptide"
MAADGYLPDWLEDTLSEGIRQWWKLKPGPPPPKPAERHQDDSRGLVLPGYKYLGPFNGLDKGEPVNEADAAALEHDKAYDRQLDSGDNPYLKYNHADAEFQERLKEDTSFGGNLGRAVFQAKKRVLEPLGLVEEPVKTAPGKKRPVEHSPAEPDSSSGTGKAGQQPARKRLNFGQTGDADSVPDPQPLGQPPAAPTSLGSTTMATGSGAPMADNNEGADGVGNSSGNWHCDSQWLGGRVITTSTRTWALPTYNNHLYKQISSQSGASNDNHYFGYSTPWGYFDFNRFHCHFSPRDWQRLINNNWGFRPKRLNFKLFNIQVKEVTQNDGTTTIANNLTSTVQVFTDSEYQLPYVLGSAHQGCLPPFPADVFMVPQYGYLTLNNGSQAVGRSSFYCLEYFPSQMLRTGNNFTFSYTFEDVPFHSSYAHSQSLDRLMNPLIDQYLYYLNRTQSNSGTLQQSRLLFSQAGPTSMSLQAKNWLPGPCYRQQRLSKQANDNNNSNFPWTAATKYHLNGRDSLVNPGPAMASHKDDEEKFFPMHGTLIFGKQGTNANDADLEHVMITDEEEIRTTNPVATEQYGNVSNNLQNSNTGPTTENVNHQGALPGMVWQDRDVYLQGPIWAKIPHTDGHFHPSPLMGGFGLKHPPPQIMIKNTPVPANPPTNFSAAKFASFITQYSTGQVSVEIEWELQKENSKRWNPEIQYTSNYNKSVNVDFTVDTNGVYSEPRPIGTRYLTRNL

SEQ ID NO: 4154 - protein, 735 aa, synthetic construct
  REGION 1..735: note = source = /note="Description of Artificial Sequence: Synthetic polypeptide"
MAADGYLPDWLEDTLSEGIRQWWKLKPGPPPPKPAERHQDDSRGLVLPGYKYLGPFNGLDKGEPVNEADAAALEHDKAYDRQLDSGDNPYLKYNHADAEFQERLKEDTSFGGNLGRAVFQAKKRVLEPLGLVEEPVKTAPGKKRPVEHSPAEPDSSSGTGKAGQQPARKRLNFGQTGDADSVPDPQPLGQPPAAPTSLGSTTMATGSGAPMADNNEGADGVGNSSGNWHCDSQWLGDRVITTSTRTWALPTYNNHLYKQISSQSGASNDNHYFGYSTPWGYFDFNRFHCHFSPRDWQRLINNNWGFRPKRLNFKLFNIQVKEVTQNDGTTTIANNLTSTVQVFTDSEYQLPYVLGSAHQGCLPPLPADVFMVPQYGYLTLNNGSQAVGRSSFYCLEYFPSQMLRTGNNFTFSYTFEDVPFHSSYAHSQSLDRLMNPLIDQYLYYLNRTQSNSGTLQQSRLLFSQAGPTSMSLQAKNWLPGPCYRQQRLSKQANDNNNSNFPWTAATKYHLNGRDSLVNPGPAMASHKDDEEKFFPMHGTLIFGKQGTNANDADLEHVMITDEEEIRTTNPVATEQYGNVSNNLQNSNTGPTTENVNHQGALPGMVWQDRDVYLQGPIWAKIPHTDGHFHPSPLMGGFGLKHPPPQIMIKNTPVPANPPTNFSAAKFASFITQYSTGQVSVEIEWELQKENSKRWNPEIQYTSNYNKSVNVDFTVDTNGVYSEPRPIGTRYLTRNL

SEQ ID NO: 4155 - protein, 735 aa, synthetic construct
  REGION 1..735: note = source = /note="Description of Artificial Sequence: Synthetic polypeptide"
MAADGYLPDWLEDTLSEGIRQWWKLKPGPPPPKPAERHQDDSRGLVLPGYKYLGPFNGLDKGEPVNEADAAALEHDKAYDRQLDSGDNPYLKYNHADAEFQERLKEDTSFGGNLGRAVFQAKKRVLEPLGLVEEPVKTAPGKKRPVEHSPAEPDSSSGTGKAGQQPARKRLNFGQTGDADSVPDPQPLGQPPAAPTSLGSTAMATGSGAPMADNNEGADGVGNSSGNWHCDSQWLGDRVITTSTRTWALPTYNNHLYKQISSQSGASNDNHYFGYSTPWGYFDFNRFHCHFSPRDWQRLINNNWGFRPKRLNFKLFNIQVKEVTQNDGTTTIANNLTSTVQVFTDSEYQLPYVLGSAHQGCLPPFPADVFMVPQYGYLTLNNGSQAVGRSSFYCLEYFPSQMLRTGNNFTFSYTFEDVPFHSSYAHSQSLDRLMNPLIDQYLYYLNRTQSNSGTLQQSRLLFSQAGPTSMSLQAKNWLPGPCYRQQRLSKQANDNNNSNFPWTAATKYHLNGRDSLVNPGPAMASHKDDEEKFFPMHGTLIFGKQGTNANDADLEHVMITDEEEIRTTNPVATEQYGNVSNNLQNSNTGPTTENVNHQGALPGMVWQDRDVYLQGPIWAKIPHTDGHFHPSPLMGGFGLKHPPPQIMIKNTPVPANPPTNFSAAKFASFITQYSTGQVSVEIEWELQKENSKRWNPEIQYTSNYNKSVNVDFTVDTNGVYSEPRPIGTRYLTRNL

SEQ ID NO: 4156 - protein, 735 aa, synthetic construct
  REGION 1..735: note = source = /note="Description of Artificial Sequence: Synthetic polypeptide"
MAADGYLPDWLEDTLSEGIRQWWKLKPGPPPPKPAERHQDDSRGLVLPGYKYLGPFNGLDKGEPVNEADAAALEHDKAYDRQLDSGDNPYLKYNHADAEFQERLKEDTSFGGNLGRAVFQAKKRVLEPLGLVEEPVKTAPGKKRPVEHSPAEPDSSSGTGKAGQQPARKRLNFGQTGDADSVPDPQPLGQPPAAPTSLGSTTMATGSGAPMADNNEGADGVGNSSGNWHCDSQWLGDRVITTSTRTWALPTYNNHLYKQISSQSGASNDNHYFGYSTPWGYFDFNRFHCHFSPRDWQRLINNNWGFRPKRLNFKLFNIQVKEVTQNDGTTTIANNLTSTVQVFTDSEYQLPYVLGSAHQGCLPPFPADVFMVPQYGYLTLNNGSQAVGRSSFYCLEYFPSQMLRTGNNFTFSYTFEDVPFHSSYAHSQSLDRLMNPLIDQYLYYLNRTQSNSGTLQQSRLLFSQAGPTSMSLQAKNWLPGPCYRQQRLSRQANDNNNSNFPWTAATKYHLNGRDSLVNPGPAMASHKDDEEKFFPMHGTLIFGKQGTNANDADLEHVMITDEEEIRTTNPVATEQYGNVSNNLQNSNTGPTTENVNHQGALPGMVWQDRDVYLQGPIWAKIPHTDGHFHPSPLMGGFGLKHPPPQIMIKNTPVPANPPTNFSAAKFASFITQYSTGQVSVEIEWELQKENSKRWNPEIQYTSNYNKSVNVDFTVDTNGVYSEPRPIGTRYLTRNL

SEQ ID NO: 4157 - protein, 735 aa, synthetic construct
  REGION 1..735: note = source = /note="Description of Artificial Sequence: Synthetic polypeptide"
MAADGYLPDWLEDTLSEGIRQWWKLKPGPPPPKPAERHQDDSRGLVLPGYKYLGPFNGLDKGEPVNEADAAALEHDKAYDRQLGSGDNPYLKYNHADAEFQERLKEDTSFGGNLGRAVFQAKKRVLEPLGLVEEPVKTAPGKKRPVEHSPAEPDSSSGTGKAGQQPARKRLNFGQTGDADSVPDPQPLGQPPAAPTSLGSTTMATGSGAPMADNNEGADGVGNSSGNWHCDSQWLGDRVITTSTRTWALPTYNNHLYKQISSQSGASNDNHYFGYSTPWGYFDFNRFHCHFSPRDWQRLINNNWGFRPKRLNFKLFNIQVKEVTQNDGTTTIANNLTSTVQVFTDSEYQLPYVLGSAHQGCLPPFPADVFMVPQYGYLTLNNGSQAVGRSSFYCLEYFPSQMLRTGNNFTFSYTFEDVPFHSSYAHSQSLDRLMNPLIDQYLYYLNRTQSNSGTLQQSRLLFSQAGPTSMSLQAKNWLPGPCYRQQRLSKQANDNNNSNFPWTAATKYHLNGRDSLVNPGPAMASHKDDEEKFFPMHGTLIFGKQGTNANDADLEHVMITDEEEIRTTNPVATEQYGNVSNNLQNSNTGPTTENVNHQGALPGMVWQDRDVYLQGPIWAKIPHTDGHFHPSPLMGGFGLKHPPPQIMIKNTPVPANPPTNFSAAKFASFITQYSTGQVSVEIEWELQKENSKRWNPEIQYTSNYNKSVNVDFTVDTNGVYSEPRPIGTRYLTRNL

SEQ ID NO: 4158 - protein, 735 aa, synthetic construct
  REGION 1..735: note = source = /note="Description of Artificial Sequence: Synthetic polypeptide"
MAADGYLPDWLEDTLSEGIRQWWKLKPGPPPPKPAERHQDDSRGLVLPGYKYLGPFNGLDKGEPVNEADAAALEHDKAYDRQLDSGDNPYLKYNHADAEFQERLKEDTSFGGNLGRAVFQAKKRVLEPLGLVEEPVKTAPGKKRPVEHSPAEPDSSSGTGKAGQQPARKRLNFGQTGDADSVPDPQPLGQPPAAPTSLGSTTMATGSGAPMADNNEGADGVGNSSGNWHCDSQWLGDRVITTSTRTWALPTYNNHLYKQISSQSGASNDNHYFGYSTPWGYFDFNRFHCHFSPRDWQRLINNNWGFRPKRLNFKLFNIQVKEVTQNDGTTTIANNLTSTVQVFTDSEYQLPYVLGSAHQGCLPPFPADVFMVPQYGYLTLNNGSQAVGRSSFYCLEYFPSQMLRTGNNFTFSYTFEDVPFHSSYAHSQSLDRLMNPLIDQYLHYLNRTQSNSGTLQQSRLLFSQAGPTSMSLQAKNWLPGPCYRQQRLSKQANDNNNSNFPWTAATKYHLNGRDSLVNPGPAMASHKDDEEKFFPMHGTLIFGKQGTNANDADLEHVMITDEEEIRTTNPVATEQYGNVSNNLQNSNTGPTTENVNHQGALPGMVWQDRDVYLQGPIWAKIPHTDGHFHPSPLMGGFGLKHPPPQIMIKNTPVPANPPTNFSAAKFASFITQYSTGQVSVEIEWELQKENSKRWNPEIQYTSNYNKSVNVDFTVDTNGVYSEPRPIGTRYLTRNL

SEQ ID NO: 4159 - protein, 735 aa, synthetic construct
  REGION 1..735: note = source = /note="Description of Artificial Sequence: Synthetic polypeptide"
MAADGYLPDWLEDTLSEGIRQWWKLKPGPPPPKPAERHQDDSRGLVLPGYKYLGPFNGLDKGEPVNEADAAALEHDKAYDRQLDSGDNPYLKYNHADAEFQERLKEDTSFGGNLGRAVFQAKKRVLEPLGLVEEPVKTAPGKKRPVEHPPAEPDSSSGTGKAGQQPARKRLNFGQTGDADSVPDPQPLGQPPAAPTSLGSTTMATGSGAPMADNNEGADGVGNSSGNWHCDSQWLGDRVITTSTRTWALPTYNNHLYKQISSQSGASNDNHYFGYSTPWGYFDFNRFHCHFSPRDWQRLINNNWGFRPKRLNFKLFNIQVKEVTQNDGTTTIANNLTSTVQVFTDSEYQLPYVLGSAHQGCLPPFPADVFMVPQYGYLTLNNGSQAVGRSSFYCLEYFPSQMLRTGNNFTFSYTFEDVPFHSSYAHSQSLDRLMNPLIDQYLYYLNRTQSNSGTLQQSRLLFSQAGPTSMSLQAKNWLPGPCYRQQRLSKQANDNNNSNFPWTAATKYHLNGRDSLVNPGPAMASHKDDEEKFFPMHGTLIFGKQGTNANDADLEHVMITDEEEIRTTNPVATEQYGNVSNNLQNSNTGPTTENVNHQGALPGMVWQDRDVYLQGPIWAKIPHTDGHFHPSPLMGGFGLKHPPPQIMIKNTPVPANPPTNFSAAKFASFITQYSTGQVSVEIEWELQKENSKRWNPEIQYTSNYNKSVNVDFTVDTNGVYSEPRPIGTRYLTRNL

SEQ ID NO: 4160 - protein, 735 aa, synthetic construct
  REGION 1..735: note = source = /note="Description of Artificial Sequence: Synthetic polypeptide"
MAADGYLPDWLEDTLSEGIRQWWKLKPGPPPPKPAERHQDDSRGLVLPGYKYLGPFNGLDKGEPVNEADAAALEHDKAYDRQLDSGDNPYLKYNHADAEFQERLKEDTSFGGNLGRAVFQAKKRVLEPLGLVEEPVKTAPGKKRPVEHSPAEPDSSSGTGKAGQQPARKRLNFGQTGDADSVPDPQPLGQPPAAPTSLGSTTMATGSGAPMADNNEGADGVGNSSGNWHCDSQWLGDRVITTSTRTWALPTYNNHLYKQISSQSGASNDNHYFGYSTPWGYFDFNRFHCHFSPRDWQRLINNNWGFRPKRLNFKLFNIQVKEVTQNDGTTTIANNLTSTVQVFTDSEYQLPYVLGSAHQGCLPPFPADVFMVPQYGYLTLNNGSQAVGRSSFYCLEYFPSQMLRTGNNFTFSYTFEDVPFHSSYAHSQSLDRLMNPLIDQYLYYLNRTQSNSGTLQQSRLLFSQAGPTSMSLQAKNWLPGPCYRQQRLSKQANDNNNSNFPWTAATKYHLNGRDSLVNPGPAMASHKDDEEKFFPMHGTLIFGKQGTNANDADLEHVMITDEEEIRTTNPVATEQYGNVSNNLQNSNTGPTTENVNHQGALPGMVWQDRDVYLQGPIWAKIPHTDGHFHPSPLMGGFGLKHPPPQIMIKNTPVPANPPTNFSAAKFASFITQYSTGQVSVEIEWELQKENSKRWNPEIQYTSNYNKSVNVDFTADTNGVYSEPRPIGTRYLTRNL

SEQ ID NO: 4161 - protein, 735 aa, synthetic construct
  REGION 1..735: note = source = /note="Description of Artificial Sequence: Synthetic polypeptide"
MAADGYLPDWLEDTLSEGIRQWWKLKPGPPPPKPAERHQDDSRGLVLPGYKYLGPFNGLDKGEPVNEADAAALEHDKAYDRQLDSGDNPYLKYNHADAEFQERLKEDTSFGGNLGRAVFQAKKRVLEPLGLVEEPVKTAPGKKRPVEHSPAEPDSSSGTGKAGQQPARKRLNFGQTGDADSVPDPQPLGQPPAAPTSLGSTTMATGSGAPMADNNEGADGVGNSSGNWHCDSQWLGDRVITTSTRTWALPTYNNHLYKQISSQSGASNDNHYFGYSTPWGYFDFNRFHCHFSPRDWQRLINNNWGFRPKRLNFKLFNIQVKEVTQNDGTTTIANNLTSTVQVFTDSEYQLPYVLGSAHQGCLPPFPADVFMVPQYGYLTLNNGSQAVGRSSFYCLEYFPSQMLRTGNNFTFSYTFEDVPFHSSYAHSQSLDRLMNPLIDQYLYYLNRTQSNSGTLRQSRLLFSQAGPTSMSLQAKNWLPGPCYRQQRLSKQANDNNNSNFPWTAATKYHLNGRDSLVNPGPAMASHKDDEEKFFPMHGTLIFGKQGTNANDADLEHVMITDEEEIRTTNPVATEQYGNVSNNLQNSNTGPTTENVNHQGALPGMVWQDRDVYLQGPIWAKIPHTDGHFHPSPLMGGFGLKHPPPQIMIKNTPVPANPPTNFSAAKFASFITQYSTGQVSVEIEWELQKENSKRWNPEIQYTSNYNKSVNVDFTVDTNGVYSEPRPIGTRYLTRNL

SEQ ID NO: 4162 - protein, 735 aa, synthetic construct
  REGION 1..735: note = source = /note="Description of Artificial Sequence: Synthetic polypeptide"
MAADGYLPDWLEDTLSEGIRQWWKLKPGPPPPKPAERHQDDSRGLVLPGYKYLGPFNGLDKGEPVNEADAAALEHDKAYDRQLDSGDNPYLKYNHADAEFQERLKEDTSFGGNLGRAVFQAKKRVLEPLGLVEEPVKTAPGKKRPVEHSPAEPDSSSGTGKAGQQPARKRLNFGQTGDADSVPDPQPLGQPPAAPTSLGSTTMATGSGAPMADNNEGADGVGNSSGNWHCDSQWLGDRVITTSTRTWALPTYNNHLYKQISSQSGASNDNHYFGYSTPWGYFDFNRFHCHFSPRDWQRLINNNWGFRPKRLNFKLFNIQVKEVTQNDGTTTIANNLTSTVQVFTDSEYQLPYVLGSAHQGCLPPFPADVFMVPQYGYLTLNNGSQAVGRSSFYCLEYFPSQMLRTGNNFTFSYTFEDVPFHSSYAHSQSLDRLMNPLIDQYLYYLNRTQSNSGTLQQSRLLFSQAGPTSMSLQAKNWLPGPCYRQQRLSKQANDNNNSNFPWTAATKYHLNGRDSLVNPGPAMASHKDDEEKFFPMHGTLIFGKQGTNANDADLEHVMITDEEEIRTTNPVATEQYGNVSNNLQNSNTGPTTENVNHQGALPGMVWQDRDVYLQGPIWAKIPHTDGHFHPSPLMGGFGLKHPPPQIMIKNTPVPANPPTNFSAAKFASFITQYSTGRVSVEIEWELQKENSKRWNPEIQYTSNYNKSVNVDFTVDTNGVYSEPRPIGTRYLTRNL

SEQ ID NO: 4163 - protein, 735 aa, synthetic construct
  REGION 1..735: note = source = /note="Description of Artificial Sequence: Synthetic polypeptide"
MAADGYLPDWLEDTLSEGIRQWWKLKPGPPPPKPAERHQDDSRGLVLPGYKYLGPFNGLDKGEPVNEADAAALEHDKAYDRQLDSGDNPYLKYNHADAEFQERLKEDTSFGGNLGRAVFRAKKRVLEPLGLVEEPVKTAPGKKRPVEHSPAEPDSSSGTGKAGQQPARKRLNFGQTGDADSVPDPQPLGQPPAAPTSLGSTTMATGSGAPMADNNEGADGVGNSSGNWHCDSQWLGDRVITTSTRTWALPTYNNHLYKQISSQSGASNDNHYFGYSTPWGYFDFNRFHCHFSPRDWQRLINNNWGFRPKRLNFKLFNIQVKEVTQNDGTTTIANNLTSTVQVFTDSEYQLPYVLGSAHQGCLPPFPADVFMVPQYGYLTLNNGSQAVGRSSFYCLEYFPSQMLRTGNNFTFSYTFEDVPFHSSYAHSQSLDRLMNPLIDQYLYYLNRTQSNSGTLQQSRLLFSQAGPTSMSLQAKNWLPGPCYRQQRLSKQANDNNNSNFPWTAATKYHLNGRDSLVNPGPAMASHKDDEEKFFPMHGTLIFGKQGTNANDADLEHVMITDEEEIRTTNPVATEQYGNVSNNLQNSNTGPTTENVNHQGALPGMVWQDRDVYLQGPIWAKIPHTDGHFHPSPLMGGFGLKHPPPQIMIKNTPVPANPPTNFSAAKFASFITQYSTGQVSVEIEWELQKENSKRWNPEIQYTSNYNKSVNVDFTVDTNGVYSEPRPIGTRYLTRNL

SEQ ID NO: 4164 - protein, 735 aa, synthetic construct
  REGION 1..735: note = source = /note="Description of Artificial Sequence: Synthetic polypeptide"
MAADGYLPDWLEDTLSEGIRQWWKPKPGPPPPKPAERHQDDSRGLVLPGYKYLGPFNGLDKGEPVNEADAAALEHDKAYDRQLDSGDNPYLKYNHADAEFQERLKEDTSFGGNLGRAVFQAKKRVLEPLGLVEEPVKTAPGKKRPVEHSPAEPDSSSGTGKAGQQPARKRLNFGQTGDADSVPDPQPLGQPPAAPTSLGSTTMATGSGAPMADNNEGADGVGNSSGNWHCDSQWLGDRVITTSTRTWALPTYNNHLYKQISSQSGASNDNHYFGYSTPWGYFDFNRFHCHFSPRDWQRLINNNWGFRPKRLNFKLFNIQVKEVTQNDGTTTIANNLTSTVQVFTDSEYQLPYVLGSAHQGCLPPFPADVFMVPQYGYLTLNNGSQAVGRSSFYCLEYFPSQMLRTGNNFTFSYTFEDVPFHSSYAHSQSLDRLMNPLIDQYLYYLNRTQSNSGTLQQSRLLFSQAGPTSMSLQAKNWLPGPCYRQQRLSKQANDNNNSNFPWTAATKYHLNGRDSLVNPGPAMASHKDDEEKFFPMHGTLIFGKQGTNANDADLEHVMITDEEEIRTTNPVATEQYGNVSNNLQNSNTGPTTENVNHQGALPGMVWQDRDVYLQGPIWAKIPHTDGHFHPSPLMGGFGLKHPPPQIMIKNTPVPANPPTNFSAAKFASFITQYSTGQVSVEIEWELQKENSKRWNPEIQYTSNYNKSVNVDFTVDTNGVYSEPRPIGTRYLTRNL

SEQ ID NO: 4165 - protein, 735 aa, synthetic construct
  REGION 1..735: note = source = /note="Description of Artificial Sequence: Synthetic polypeptide"
MAADGYLPDWLEDTLSEGIRQWWKLKPGPPPPKPAERHQDDSRGLVLPGYKYLGPFNGLDKGEPVNEADAAALEHDKAYDRQLDSGDNPYLKYNHADAEFQERLKEDTSFGGNLGRAVFQAKKRVLEPLGLVEEPVKTAPGKKRPVEHSPAEPDSSSGTGKAGQQPARKRLNFGQTGDADSVPDPQPLGQPPAAPTSLGSTTMATGSGAPMADNNEGADGVGNSSGNWHCDSQWLGDRVITTSTRTWALPTYNNHLYKQISSQSGASNDNHYFGYSTPWGYFDFNRFHCHFSPRDWQRLINNNWGFRPKRLNFKLFNIQVKEVTQNDGTTTIANNLTSTVQVFTDSEYQLPYVLGSAHQGCLPPFPADVFMVPQYGYLTLNNGSQAVGRSSFYCLEYFPSQMLRTGNNFTFSYTFEDVPFHSSYAHSQSLDRLMNPLIDQYLYYLNRTQSNSGTLQQSRLLFSQAGPTSMSLQAKNWLPGPCYRQQRLSKQANDNNNSNFPWTAATKYHLNGRDSLVNPGPAMASHKDDEEKFFPMHGTLIFGKQGTNANDADLEHVMITDEEEIRTTNPVATEQYGNVSNNLQNSNTGPTTENANHQGALPGMVWQDRDVYLQGPIWAKIPHTDGHFHPSPLMGGFGLKHPPPQIMIKNTPVPANPPTNFSAAKFASFITQYSTGQVSVEIEWELQKENSKRWNPEIQYTSNYNKSVNVDFTVDTNGVYSEPRPIGTRYLTRNL

SEQ ID NO: 4166 - protein, 735 aa, synthetic construct
  REGION 1..735: note = source = /note="Description of Artificial Sequence: Synthetic polypeptide"
MAADGYLPDWLEDTPSEGIRQWWKLKPGPPPPKPAERHQDDSRGLVLPGYKYLGPFNGLDKGEPVNEADAAALEHDKAYDRQLDSGDNPYLKYNHADAEFQERLKEDTSFGGNLGRAVFQAKKRVLEPLGLVEEPVKTAPGKKRPVEHSPAEPDSSSGTGKAGQQPARKRLNFGQTGDADSVPDPQPLGQPPAAPTSLGSTTMATGSGAPMADNNEGADGVGNSSGNWHCDSQWLGDRVITTSTRTWALPTYNNHLYKQISSQSGASNDNHYFGYSTPWGYFDFNRFHCHFSPRDWQRLINNNWGFRPKRLNFKLFNIQVKEVTQNDGTTTIANNLTSTVQVFTDSEYQLPYVLGSAHQGCLPPFPADVFMVPQYGYLTLNNGSQAVGRSSFYCLEYFPSQMLRTGNNFTFSYTFEDVPFHSSYAHSQSLDRLMNPLIDQYLYYLNRTQSNSGTLQQSRLLFSQAGPTSMSLQAKNWLPGPCYRQQRLSKQANDNNNSNFPWTAATKYHLNGRDSLVNPGPAMASHKDDEEKFFPMHGTLIFGKQGTNANDADLEHVMITDEEEIRTTNPVATEQYGNVSNNLQNSNTGPTTENVNHQGALPGMVWQDRDVYLQGPIWAKIPHTDGHFHPSPLMGGFGLKHPPPQIMIKNTPVPANPPTNFSAAKFASFITQYSTGQVSVEIEWELQKENSKRWNPEIQYTSNYNKSVNVDFTVDTNGVYSEPRPIGTRYLTRNL

SEQ ID NO: 4167 - protein, 735 aa, synthetic construct
  REGION 1..735: note = source = /note="Description of Artificial Sequence: Synthetic polypeptide"
MAADGYLPDWLEDTLSEGIRQWWKLKPGPPPPKPAERHQDDSRGLVLPGYKYLGPFNGLDKGEPVNEADAAALEHDKAYDRQLDSGDNPYLKYNHADAEFQERLKEDTSFGGNLGRAVFQAKKRVLEPLGLVEEPVKTAPGKKRPVEHSPAEPDSSSGTGKAGQQPARKRLNFGQTGDADSVPDPQPLGQPPAAPTSLGSTTMATGSGAPMADNNEGADGVGNSSGNWHCDSQWLGDRVITTSTRTWALPTYNNHLYKQISSQSGASNDNHYFGYSTPWGYFDFNRFHCHFSPRDWQRLINNNWGFRPKRLNFRLFNIQVKEVTQNDGTTTIANNLTSTVQVFTDSEYQLPYVLGSAHQGCLPPFPADVFMVPQYGYLTLNNGSQAVGRSSFYCLEYFPSQMLRTGNNFTFSYTFEDVPFHSSYAHSQSLDRLMNPLIDQYLYYLNRTQSNSGTLQQSRLLFSQAGPTSMSLQAKNWLPGPCYRQQRLSKQANDNNNSNFPWTAATKYHLNGRDSLVNPGPAMASHKDDEEKFFPMHGTLIFGKQGTNANDADLEHVMITDEEEIRTTNPVATEQYGNVSNNLQNSNTGPTTENVNHQGALPGMVWQDRDVYLQGPIWAKIPHTDGHFHPSPLMGGFGLKHPPPQIMIKNTPVPANPPTNFSAAKFASFITQYSTGQVSVEIEWELQKENSKRWNPEIQYTSNYNKSVNVDFTVDTNGVYSEPRPIGTRYLTRNL

SEQ ID NO: 4168 - protein, 735 aa, synthetic construct
  REGION 1..735: note = source = /note="Description of Artificial Sequence: Synthetic polypeptide"
MAADGYLPDWLEDTLSEGIRQWWKLKPGPPPPKPAERHQDDSRGLVLPGYKYLGPFNGLDKGEPVNEADAAALEHDKAYDRQLDSGDNPYLKYNHADAEFQERLKEDTSFGGNLGRAVFQAKKRVLEPLGLVEEPVKTAPGKKRPVEHSPAEPDSSSGTGKAGQQPARKRLNFGQAGDADSVPDPQPLGQPPAAPTSLGSTTMATGSGAPMADNNEGADGVGNSSGNWHCDSQWLGDRVITTSTRTWALPTYNNHLYKQISSQSGASNDNHYFGYSTPWGYFDFNRFHCHFSPRDWQRLINNNWGFRPKRLNFKLFNIQVKEVTQNDGTTTIANNLTSTVQVFTDSEYQLPYVLGSAHQGCLPPFPADVFMVPQYGYLTLNNGSQAVGRSSFYCLEYFPSQMLRTGNNFTFSYTFEDVPFHSSYAHSQSLDRLMNPLIDQYLYYLNRTQSNSGTLQQSRLLFSQAGPTSMSLQAKNWLPGPCYRQQRLSKQANDNNNSNFPWTAATKYHLNGRDSLVNPGPAMASHKDDEEKFFPMHGTLIFGKQGTNANDADLEHVMITDEEEIRTTNPVATEQYGNVSNNLQNSNTGPTTENVNHQGALPGMVWQDRDVYLQGPIWAKIPHTDGHFHPSPLMGGFGLKHPPPQIMIKNTPVPANPPTNFSAAKFASFITQYSTGQVSVEIEWELQKENSKRWNPEIQYTSNYNKSVNVDFTVDTNGVYSEPRPIGTRYLTRNL

SEQ ID NO: 4169 - protein, 735 aa, synthetic construct
  REGION 1..735: note = source = /note="Description of Artificial Sequence: Synthetic polypeptide"
MAADGYLPDWLEDTLSEGIRQWWKLKPGPPPPKPAERHQDDSRGLVLPGYKYLGPFNGLDKGEPVNEADAAALEHDKAYDRQLDSGDNPYLKYNHADAEFQERLKEDTSFGGNLGRAVFQAKKRVLEPLGLVEEPVKTAPGKKRPVEHSPAEPDSSSGTGKAGQQPARKRLNFGQTGDADSVPDPQPLGQPPAAPTSLGSTTVATGSGAPMADNNEGADGVGNSSGNWHCDSQWLGDRVITTSTRTWALPTYNNHLYKQISSQSGASNDNHYFGYSTPWGYFDFNRFHCHFSPRDWQRLINNNWGFRPKRLNFKLFNIQVKEVTQNDGTTTIANNLTSTVQVFTDSEYQLPYVLGSAHQGCLPPFPADVFMVPQYGYLTLNNGSQAVGRSSFYCLEYFPSQMLRTGNNFTFSYTFEDVPFHSSYAHSQSLDRLMNPLIDQYLYYLNRTQSNSGTLQQSRLLFSQAGPTSMSLQAKNWLPGPCYRQQRLSKQANDNNNSNFPWTAATKYHLNGRDSLVNPGPAMASHKDDEEKFFPMHGTLIFGKQGTNANDADLEHVMITDEEEIRTTNPVATEQYGNVSNNLQNSNTGPTTENVNHQGALPGMVWQDRDVYLQGPIWAKIPHTDGHFHPSPLMGGFGLKHPPPQIMIKNTPVPANPPTNFSAAKFASFITQYSTGQVSVEIEWELQKENSKRWNPEIQYTSNYNKSVNVDFTVDTNGVYSEPRPIGTRYLTRNL

SEQ ID NO: 4170 - protein, 735 aa, synthetic construct
  REGION 1..735: note = source = /note="Description of Artificial Sequence: Synthetic polypeptide"
MAADGYLPDWLEDTLSEGIRQWWKLKPGPPPPKPAERHQDDSRGLVLPGYKYLGPFNGLDKGEPVNEADAAALEHDKAYDRQLDSGDNPYLKYNHADAEFQERLKEDTSFGGNLGRAVFQAKKRVLEPLGLVEEPVKTAPGKKRPVEHSPAEPDSSSGTGKAGQQPARKRLNFGQTGDADSVPDPQPLGQPPAAPTSLGSTTMATGSGAPMADNNEGADGVGNSSGNWHCDSQWLGDRVITTSTRTWALPTYNNHLYKQISSQSGASNDNHYFGYSTPWGYFDFNRFHCHFSPRDWQRLINNNWGFRPKRLNFKLFNIQVKEVTQNDGTTTIANNLTSTVQVFTDSEYQLPYVLGSAHQGCLPPFPADVFMVPQYGYLTLNNGSQAVGRSSFYCLEYFPSQMLRTGNNFTFSYTFEDVPFHSSYAHSQSLDRLMNPLIDQYLYYLNRTQSNSGTLQQSRLLFSQAGPTSMSLQAKNWLPGPCYRQQRLSKQANDNNNSNFPWTAATKYHLNGRDSLVNPGPAMASHKGDEEKFFPMHGTLIFGKQGTNANDADLEHVMITDEEEIRTTNPVATEQYGNVSNNLQNSNTGPTTENVNHQGALPGMVWQDRDVYLQGPIWAKIPHTDGHFHPSPLMGGFGLKHPPPQIMIKNTPVPANPPTNFSAAKFASFITQYSTGQVSVEIEWELQKENSKRWNPEIQYTSNYNKSVNVDFTVDTNGVYSEPRPIGTRYLTRNL

SEQ ID NO: 4171 - protein, 735 aa, synthetic construct
  REGION 1..735: note = source = /note="Description of Artificial Sequence: Synthetic polypeptide"
MAADGYLPDWLEDTLSEGIRQWWKLKPGPPPPKPAERHQDDSRGLVLPGYKYLGPFNGLDKGEPVNEADAAALEHDKAYDRQLDSGDNPYLKYNHADAEFQERLKEDTSFGGNLGRAVFQAKKRVLEPLGLVEEPVKTAPGKKRPVEHSPAEPDSSSGTGKAGQQPARKGLNFGQTGDADSVPDPQPLGQPPAAPTSLGSTTMATGSGAPMADNNEGADGVGNSSGNWHCDSQWLGDRVITTSTRTWALPTYNNHLYKQISSQSGASNDNHYFGYSTPWGYFDFNRFHCHFSPRDWQRLINNNWGFRPKRLNFKLFNIQVKEVTQNDGTTTIANNLTSTVQVFTDSEYQLPYVLGSAHQGCLPPFPADVFMVPQYGYLTLNNGSQAVGRSSFYCLEYFPSQMLRTGNNFTFSYTFEDVPFHSSYAHSQSLDRLMNPLIDQYLYYLNRTQSNSGTLQQSRLLFSQAGPTSMSLQAKNWLPGPCYRQQRLSKQANDNNNSNFPWTAATKYHLNGRDSLVNPGPAMASHKDDEEKFFPMHGTLIFGKQGTNANDADLEHVMITDEEEIRTTNPVATEQYGNVSNNLQNSNTGPTTENVNHQGALPGMVWQDRDVYLQGPIWAKIPHTDGHFHPSPLMGGFGLKHPPPQIMIKNTPVPANPPTNFSAAKFASFITQYSTGQVSVEIEWELQKENSKRWNPEIQYTSNYNKSVNVDFTVDTNGVYSEPRPIGTRYLTRNL

SEQ ID NO: 4172 - protein, 735 aa, synthetic construct
  REGION 1..735: note = source = /note="Description of Artificial Sequence: Synthetic polypeptide"
MAADGYLPDWLEDTLSEGIRQWWKLKPGPPPPKPAERHQDDSRGLVLPGYKYLGPFNGLDKGEPVNEADAAALEHDKAYDRQLDSGDNPYLKYNHADAEFQERLKEDTSFGGNLGRAVFQAKKRVLEPLGLVEEPVKTAPGKKRPVEHSPAEPDSSSGTGKAGQQPARKRLNFGQTGDADSVPDPQPLGQPPAAPTSLGSTTMATGSGAPMADNNEGADGVGNSSGNWHCDSQWLGDRVITTSTRTWALPTYNNHLYKQISSQSGASNDNHYFGYSTPWGYFDFNRFHCHFSPRDWQRLINNNWGFRPKRLNFKLFNIQVKEVTQNDGTATIANNLTSTVQVFTDSEYQLPYVLGSAHQGCLPPFPADVFMVPQYGYLTLNNGSQAVGRSSFYCLEYFPSQMLRTGNNFTFSYTFEDVPFHSSYAHSQSLDRLMNPLIDQYLYYLNRTQSNSGTLQQSRLLFSQAGPTSMSLQAKNWLPGPCYRQQRLSKQANDNNNSNFPWTAATKYHLNGRDSLVNPGPAMASHKDDEEKFFPMHGTLIFGKQGTNANDADLEHVMITDEEEIRTTNPVATEQYGNVSNNLQNSNTGPTTENVNHQGALPGMVWQDRDVYLQGPIWAKIPHTDGHFHPSPLMGGFGLKHPPPQIMIKNTPVPANPPTNFSAAKFASFITQYSTGQVSVEIEWELQKENSKRWNPEIQYTSNYNKSVNVDFTVDTNGVYSEPRPIGTRYLTRNL

SEQ ID NO: 4173 - protein, 735 aa, synthetic construct
  REGION 1..735: note = source = /note="Description of Artificial Sequence: Synthetic polypeptide"
MAADGYLPDWLEDTLSEGIRQWWKLKPGPPPPKPAERHQDDSRGLVLPGYKYLGPFNGLDKGEPVNEADAAALEHDKAYDRQLDSGDNPYLKYNHADAEFQERLKEDTSFGGNLGRAVFQAKKRVLEPLGLVEEPVKTAPGKKRPVEHSPAEPDSSSGTGKAGQQPARRRLNFGQTGDADSVPDPQPLGQPPAAPTSLGSTTMATGSGAPMADNNEGADGVGNSSGNWHCDSQWLGDRVITTSTRTWALPTYNNHLYKQISSQSGASNDNHYFGYSTPWGYFDFNRFHCHFSPRDWQRLINNNWGFRPKRLNFKLFNIQVKEVTQNDGTTTIANNLTSTVQVFTDSEYQLPYVLGSAHQGCLPPFPADVFMVPQYGYLTLNNGSQAVGRSSFYCLEYFPSQMLRTGNNFTFSYTFEDVPFHSSYAHSQSLDRLMNPLIDQYLYYLNRTQSNSGTLQQSRLLFSQAGPTSMSLQAKNWLPGPCYRQQRLSKQANDNNNSNFPWTAATKYHLNGRDSLVNPGPAMASHKDDEEKFFPMHGTLIFGKQGTNANDADLEHVMITDEEEIRTTNPVATEQYGNVSNNLQNSNTGPTTENVNHQGALPGMVWQDRDVYLQGPIWAKIPHTDGHFHPSPLMGGFGLKHPPPQIMIKNTPVPANPPTNFSAAKFASFITQYSTGQVSVEIEWELQKENSKRWNPEIQYTSNYNKSVNVDFTVDTNGVYSEPRPIGTRYLTRNL

SEQ ID NO: 4174 - protein, 735 aa, synthetic construct
  REGION 1..735: note = source = /note="Description of Artificial Sequence: Synthetic polypeptide"
MAADGYLPDWLEDTLSEGIRQWWKLKPGPPPPKPAERHQDDSRGLVLPGYKYLGPFNGLDKGEPVNEADAAALEHDKAYDRQLDSGDNPYLKYNHADAEFQERLKEDTSFGGNLGRAVFQAKKRVLEPLGLVEEPVKTAPGKKRPVEHSPAEPDSSSGTGKAGQQPARKRLNFGQTGDADSVPDPQPLGQPPAAPTSLGSTTMATGSGAPMADNNEGADGVGNSSGNWHCDSQWLGDRVITTSTRTWALPTYNNHLYKQISSQSGASNDNHYFGYSTPWGYFDFNRFHCHFSPRDWQRLINNNWGFRPKRLNFKLFNIQVKEVTQNDGTTTIANNLTSTVQVFTDSEYQLPYVLGSAHQGCLPPFPADVFMVPQYGYLTLNNGSQAVGRSSFYCLEYFPSQMLRTGNNFTFSYTFEDVPFHSSYAHSQSLDRLMNPLIDQYLYYLNRTQSNSGTLQQSRLLFSQAGPTSMSLQAKNWLPGPCYRQQRLSKQANDNNNSNFPWTAATKYHLNGRDSLVNPGPAMASHKDDEEKFFPMHGTLIFGKQGTNANDADLEHVMITDEEEIRTTNPVATEQYGNVSNNLQNSNTGPTTENVNHQGALPGMVWQDRDVYLQGPIWAKIPHTDGHFHPSPLMGGFGLKHPPPQIMIKNTPVPANPPTNFSAAKFASLITQYSTGQVSVEIEWELQKENSKRWNPEIQYTSNYNKSVNVDFTVDTNGVYSEPRPIGTRYLTRNL

SEQ ID NO: 4175 - protein, 735 aa, synthetic construct
  REGION 1..735: note = source = /note="Description of Artificial Sequence: Synthetic polypeptide"
MAADGYLPDWLEDTLSEGIRQWWKLKPGPPPPKPAERHQDDSRGLVLPGYKYLGPFNGLDKGEPVNEADAAALEHDKAYDRQLDSGDNPYLKYNHADAEFQERLKEDTSFGGNLGRAVFQAKKRVLEPLGLVEEPVKTAPGKKRPVEHSPAEPDSSSGTGKAGQQPARKRLNFGQTGDADSVPDPQPLGQPPAAPTSLGSTTMATGSGAPMADNNEGADGVGNSSGNWHCDSQWLGDRVITTSTRTWALPTYNNHLYKQISSQSGASNDNHYFGYSTPWGYFDFNRFHCHFSPRDWQRLINNNWGFRPKRLSFKLFNIQVKEVTQNDGTTTIANNLTSTVQVFTDSEYQLPYVLGSAHQGCLPPFPADVFMVPQYGYLTLNNGSQAVGRSSFYCLEYFPSQMLRTGNNFTFSYTFEDVPFHSSYAHSQSLDRLMNPLIDQYLYYLNRTQSNSGTLQQSRLLFSQAGPTSMSLQAKNWLPGPCYRQQRLSKQANDNNNSNFPWTAATKYHLNGRDSLVNPGPAMASHKDDEEKFFPMHGTLIFGKQGTNANDADLEHVMITDEEEIRTTNPVATEQYGNVSNNLQNSNTGPTTENVNHQGALPGMVWQDRDVYLQGPIWAKIPHTDGHFHPSPLMGGFGLKHPPPQIMIKNTPVPANPPTNFSAAKFASFITQYSTGQVSVEIEWELQKENSKRWNPEIQYTSNYNKSVNVDFTVDTNGVYSEPRPIGTRYLTRNL

SEQ ID NO: 4176 - protein, 735 aa, synthetic construct
  REGION 1..735: note = source = /note="Description of Artificial Sequence: Synthetic polypeptide"
MAADGYLPDWLEDTLSEGIRQWWKLKPGPPPPKPAERHQDDSRGLVLPGYKYLGPFNGLDKGEPVNEADAAALEHDKAYDRQLDSGDNPYLKYNHADAEFQERLKEDTSFGGNLGRAVFQAKKRVLEPLGLVEEPVKTAPGKKRPVEHSPAEPDSSSGTGKAGQQPARKRLNFGQTGDADSVPDPQPLGQPPAAPTSLGSTTMATGSGAPMADNNEGADGVGNSSGNWHCDSQWLGDRVITTSTRTWALPTYNNHLYKQISSQSGASNDNHYFGYSTPWGYFDFNRFHCHFSPRDWQRLINNNWGFRPKRLNFKLFNIQVKEVTQNDGTTTIANNLTSTVQVFTDSEYQLPYVLGSAHQGCLPPFPADVFMVPQYGYLTLNNGSQAVGRSSFYCLEYFPSQMLRTGNNFTFSYTFEDVPFHSSYAHSQSLDRLMNPLIDQYLYYLNRTQSNSGTLQQSRLLFSQAGPTSMSLQAKNWLPGPCYRQQRLSKQANDNNNSNFPWTAATKYHLNGRDSLVNPGPAMASHKDDEEKFFPMHGTLIFGKQGTNANDADLEHVMITDEEEIRTTNPVATGQYGNVSNNLQNSNTGPTTENVNHQGALPGMVWQDRDVYLQGPIWAKIPHTDGHFHPSPLMGGFGLKHPPPQIMIKNTPVPANPPTNFSAAKFASFITQYSTGQVSVEIEWELQKENSKRWNPEIQYTSNYNKSVNVDFTVDTNGVYSEPRPIGTRYLTRNL

SEQ ID NO: 4177 - protein, 735 aa, synthetic construct
  REGION 1..735: note = source = /note="Description of Artificial Sequence: Synthetic polypeptide"
MAADGYLPDWLEDTLSEGIRQWWKLKPGPPPPKPAERHQDDSRGLVLPGYKYLGPFNGLDKGEPVNEADAAALEHDKAYDRQLDSGDNPYLKYNHADAEFQERLKEDTSFGGNLGRAVFQAKKRVLEPLGLVEEPVKTAPGKKRPVEHSPAEPDSSSGTGKAGQQPARKRLNFGQTGDADSVPDPQPLGQPPAAPTSLGSTTMATGSGAPMADNNEGADGVGNSSGNWHCDSQWLGDRVITTSTRTWALPTYNNHLYKQISSQSGASNDNHYFGYSTPWGYFDFNRFHCHFSPRDWQRLINNNWGFRPKRLNFKLFNIQVKEVTQNDGTTTIANNLTSTVQVFTDSEYQLPYVLGSAHQGCLPPFPADVFMVPQYGYLTLNNGSQAVGRSSFYCLEYFPSQMLRTGNNFTFSYTFEDVPFHSSYAHSQSLDRLMNPLIDQYLYYLNRTQSNSGTLQQSRLLFSQAGPTSMSLQAKNWLPGPCYRQQRLSKQANDNNNSNFPWTAATKYHLNGRDSLVNPGPAMASHKDDEEKFFPMHGTLIFGKQGTNANDADLEHVMITDEEEIRTTNPVATEQYGNVPNNLQNSNTGPTTENVNHQGALPGMVWQDRDVYLQGPIWAKIPHTDGHFHPSPLMGGFGLKHPPPQIMIKNTPVPANPPTNFSAAKFASFITQYSTGQVSVEIEWELQKENSKRWNPEIQYTSNYNKSVNVDFTVDTNGVYSEPRPIGTRYLTRNL

SEQ ID NO: 4178 - protein, 735 aa, synthetic construct
  REGION 1..735: note = source = /note="Description of Artificial Sequence: Synthetic polypeptide"
MAADGYLPDWLEDTLSEGIRQWWKLKPGPPPPKPAERHQDDSRGLVLPGYKYLGPFNGLDKGEPVNEADAAALEHDKAYDRQLDSGDNPYLKYNHADAEFQERLKEDTSFGGNLGRAVFQAKKRVLEPLGLVEEPVKTAPGKKRPVEHSPAEPDSSSGTGKAGQQPARKRLNFGQTGDADSVPDPQPLGQPPAAPTSLGSTTMATGSGAPMADNNEGADGVGNSSGNWHCDSQWLGDRVITTSTRTWALPTYNNHLYKQISSQSGASNDNHYFGYSTPWGYFDFNRFHCHFSPRDWQRLINNNWGFRPKRLNFKLFNIQVKEVTQNDGTTTIANNLTSTVQVFTDSEYQLPYVLGSAHQGCLPPFPADVFMVPQYGYLTPNNGSQAVGRSSFYCLEYFPSQMLRTGNNFTFSYTFEDVPFHSSYAHSQSLDRLMNPLIDQYLYYLNRTQSNSGTLQQSRLLFSQAGPTSMSLQAKNWLPGPCYRQQRLSKQANDNNNSNFPWTAATKYHLNGRDSLVNPGPAMASHKDDEEKFFPMHGTLIFGKQGTNANDADLEHVMITDEEEIRTTNPVATEQYGNVSNNLQNSNTGPTTENVNHQGALPGMVWQDRDVYLQGPIWAKIPHTDGHFHPSPLMGGFGLKHPPPQIMIKNTPVPANPPTNFSAAKFASFITQYSTGQVSVEIEWELQKENSKRWNPEIQYTSNYNKSVNVDFTVDTNGVYSEPRPIGTRYLTRNL

SEQ ID NO: 4179 - protein, 735 aa, synthetic construct
  REGION 1..735: note = source = /note="Description of Artificial Sequence: Synthetic polypeptide"
MAADGYLPDWLEDTLSEGIRQWWKLKPGPPPPKPAERHQDDSRGLVLPGYKYLGPFNGLDKGEPVNEADAAALEHDKAYDRQLDSGDNPYLKYNHADAEFQERLKEDTSFGGNLGRAAFQAKKRVLEPLGLVEEPVKTAPGKKRPVEHSPAEPDSSSGTGKAGQQPARKRLNFGQTGDADSVPDPQPLGQPPAAPTSLGSTTMATGSGAPMADNNEGADGVGNSSGNWHCDSQWLGDRVITTSTRTWALPTYNNHLYKQISSQSGASNDNHYFGYSTPWGYFDFNRFHCHFSPRDWQRLINNNWGFRPKRLNFKLFNIQVKEVTQNDGTTTIANNLTSTVQVFTDSEYQLPYVLGSAHQGCLPPFPADVFMVPQYGYLTLNNGSQAVGRSSFYCLEYFPSQMLRTGNNFTFSYTFEDVPFHSSYAHSQSLDRLMNPLIDQYLYYLNRTQSNSGTLQQSRLLFSQAGPTSMSLQAKNWLPGPCYRQQRLSKQANDNNNSNFPWTAATKYHLNGRDSLVNPGPAMASHKDDEEKFFPMHGTLIFGKQGTNANDADLEHVMITDEEEIRTTNPVATEQYGNVSNNLQNSNTGPTTENVNHQGALPGMVWQDRDVYLQGPIWAKIPHTDGHFHPSPLMGGFGLKHPPPQIMIKNTPVPANPPTNFSAAKFASFITQYSTGQVSVEIEWELQKENSKRWNPEIQYTSNYNKSVNVDFTVDTNGVYSEPRPIGTRYLTRNL

SEQ ID NO: 4180 - protein, 735 aa, synthetic construct
  REGION 1..735: note = source = /note="Description of Artificial Sequence: Synthetic polypeptide"
MAADGYLPDWLEDTLSEGIRQWWKLKPGPPPPKPAERHQDDSRGLVLPGYKYLGPFNGLDKGEPVNEADAAALEHDKAYDRQLDSGDNPYLKYNHADAEFQERLKEDTSFGGNLGRAVFQAKKRVLEPLGLVEEPVKTAPGKKRPVEHSPAEPDSSSGTGKAGQQPARKRLNFGQTGDADSVPDPQPLGQPPAAPTSLGSTTMATGSGAPMADNNEGADGVGNSSGNWHCDSQWLGDRVITTSTRTWALPTYNNHLYKQISSQSGASNDNHYFGYSTPWGYFDFNRFHCHFSPRDWQRLINNNWGFRPKRLNFKLFNIQVKEVTQNDGTTTIANNLTSTVQVFTDSEYQLPYVLGSAHQGCLPPFPADVFMVPQYGYLTLNNGSQAVGRSSFYCLEYFPPQMLRTGNNFTFSYTFEDVPFHSSYAHSQSLDRLMNPLIDQYLYYLNRTQSNSGTLQQSRLLFSQAGPTSMSLQAKNWLPGPCYRQQRLSKQANDNNNSNFPWTAATKYHLNGRDSLVNPGPAMASHKDDEEKFFPMHGTLIFGKQGTNANDADLEHVMITDEEEIRTTNPVATEQYGNVSNNLQNSNTGPTTENVNHQGALPGMVWQDRDVYLQGPIWAKIPHTDGHFHPSPLMGGFGLKHPPPQIMIKNTPVPANPPTNFSAAKFASFITQYSTGQVSVEIEWELQKENSKRWNPEIQYTSNYNKSVNVDFTVDTNGVYSEPRPIGTRYLTRNL

SEQ ID NO: 4181 - protein, 735 aa, synthetic construct
  REGION 1..735: note = source = /note="Description of Artificial Sequence: Synthetic polypeptide"
MAADGYLPDWLEDTLPEGIRQWWKLKPGPPPPKPAERHQDDSRGLVLPGYKYLGPFNGLDKGEPVNEADAAALEHDKAYDRQLDSGDNPYLKYNHADAEFQERLKEDTSFGGNLGRAVFQAKKRVLEPLGLVEEPVKTAPGKKRPVEHSPAEPDSSSGTGKAGQQPARKRLNFGQTGDADSVPDPQPLGQPPAAPTSLGSTTMATGSGAPMADNNEGADGVGNSSGNWHCDSQWLGDRVITTSTRTWALPTYNNHLYKQISSQSGASNDNHYFGYSTPWGYFDFNRFHCHFSPRDWQRLINNNWGFRPKRLNFKLFNIQVKEVTQNDGTTTIANNLTSTVQVFTDSEYQLPYVLGSAHQGCLPPFPADVFMVPQYGYLTLNNGSQAVGRSSFYCLEYFPSQMLRTGNNFTFSYTFEDVPFHSSYAHSQSLDRLMNPLIDQYLYYLNRTQSNSGTLQQSRLLFSQAGPTSMSLQAKNWLPGPCYRQQRLSKQANDNNNSNFPWTAATKYHLNGRDSLVNPGPAMASHKDDEEKFFPMHGTLIFGKQGTNANDADLEHVMITDEEEIRTTNPVATEQYGNVSNNLQNSNTGPTTENVNHQGALPGMVWQDRDVYLQGPIWAKIPHTDGHFHPSPLMGGFGLKHPPPQIMIKNTPVPANPPTNFSAAKFASFITQYSTGQVSVEIEWELQKENSKRWNPEIQYTSNYNKSVNVDFTVDTNGVYSEPRPIGTRYLTRNL

SEQ ID NO: 4182 - protein, 735 aa, synthetic construct
  REGION 1..735: note = source = /note="Description of Artificial Sequence: Synthetic polypeptide"
MAADGYLPDWLEDTLSEGIRQWWKLKPGPPPPKPAERHQDDSRGLVLPGYKYLGPFNGLDKGEPVNEADAAALEHDKAYDRQLDSGDNPYLKYNHADAEFQERLKEDTSFGGNLGRAVFQAKKRVLEPLGLVEEPVKTAPGKKRPVEHSPAEPDSSSGTGKAGQQPARKRLNFGQTGDADSVPDPQPLGQPPAAPTSLGSTTMATGSGAPMADNNEGADGVGNSSGNWHCDSQWLGDRVITTSTRTWALPTYNNHLYKQISSQSGASNDNHYFGYSTPWGYFDFNRFHCHFSPRDWQRLINNNWGFRPKRLNFKLFNIQVKEVTQNDGTTTIANNLTSTVQVFTDSEYQLPYVLGSAHQGCLPPFPADVFMVPQYGYLTLNNGSQAVGRSSFYCLEYFPSQMLRTGNNFTFSYTFEDVPFHSSYAHSQSLDRLMNPLIDQYLYYLNRTQSNSGTLQQSRLLFSQAGPTSMSLQAKNWLPGPCYRRQRLSKQANDNNNSNFPWTAATKYHLNGRDSLVNPGPAMASHKDDEEKFFPMHGTLIFGKQGTNANDADLEHVMITDEEEIRTTNPVATEQYGNVSNNLQNSNTGPTTENVNHQGALPGMVWQDRDVYLQGPIWAKIPHTDGHFHPSPLMGGFGLKHPPPQIMIKNTPVPANPPTNFSAAKFASFITQYSTGQVSVEIEWELQKENSKRWNPEIQYTSNYNKSVNVDFTVDTNGVYSEPRPIGTRYLTRNL

SEQ ID NO: 4183 - protein, 735 aa, synthetic construct
  REGION 1..735: note = source = /note="Description of Artificial Sequence: Synthetic polypeptide"
MAADGYLPDWLEDTLSEGIRQWWKLKPGPPPPKPAERHQDDSRGLVLPGYKYLGPFNGLDKGEPVNEADAAALEHDKAYDRQLDSGDNPYLKYNHADAEFQERLKEDTSFGGNLGRAVFQAKKRVLEPLGLVEEPVKTAPGKKRPVEHSPAEPDSSSGTGKAGQQPARKRLNFGQTGDADSVPDPQPLGQPPAAPTSLGSTTMATGSGAPMADNNEGADGVGNSSGNWHCDSQWLGDRVITTSTRTWALPTYNNHLYKQISSQSGASNDNHYFGYSTPWGYFDFNRFHCHFSPRDWQRLINNNWGFRPKRLNFKLFNIQVKEVTQNDGTTTIANNLTSTVQVFTDSEYQLPYVLGSAHQGCLPPFPADVFMVPQYGYLTLNNGSQAVGRSSFYCLEYLPSQMLRTGNNFTFSYTFEDVPFHSSYAHSQSLDRLMNPLIDQYLYYLNRTQSNSGTLQQSRLLFSQAGPTSMSLQAKNWLPGPCYRQQRLSKQANDNNNSNFPWTAATKYHLNGRDSLVNPGPAMASHKDDEEKFFPMHGTLIFGKQGTNANDADLEHVMITDEEEIRTTNPVATEQYGNVSNNLQNSNTGPTTENVNHQGALPGMVWQDRDVYLQGPIWAKIPHTDGHFHPSPLMGGFGLKHPPPQIMIKNTPVPANPPTNFSAAKFASFITQYSTGQVSVEIEWELQKENSKRWNPEIQYTSNYNKSVNVDFTVDTNGVYSEPRPIGTRYLTRNL

SEQ ID NO: 4184 - protein, 735 aa, synthetic construct
  REGION 1..735: note = source = /note="Description of Artificial Sequence: Synthetic polypeptide"
MAADGYLPDWLEDTLSEGIRQWWKLKPGPPPPKPAERHQDDSRGLVLPGYKYLGPFNGLDKGEPVNEADAAALEHDKAYDRQLDSGDNPYLKYNHADAEFQERLKEDTSFGGNLGRAVFQAKKRVLEPLGLVEEPVKTAPGKKRPVEHSPAEPDSSSGTGKAGQQPARKRLNFGQTGDADSVPDPQPLGQPPAAPTSLGSTTMATGSGAPMADNNEGADGVGNSSGNWHCDSQWLGDRVITTSTRTWALPTYNNHLYKQISSQSGASNDNHYFGYSTPWGYFDFNRFHCHFSPRDWQRLINNNWGFRPKRLNFKLFNIQVKEVTQNDGTTTIANNLTSTVQVFTDSEYQLPYVLGSAHQGCLPPFPADVFMVPQYGYLTLNNGSQAVGRSSFYCLEYFPSQMLRTGNNFTFSYTFEDVPFHSSYAHSQSLDRLMNPLIDQYLYYLNRTQSNSGTLQQSRLLFSQAGPTSMSLQAKNWLPGPCYRQQRLSKQANDNNNGNFPWTAATKYHLNGRDSLVNPGPAMASHKDDEEKFFPMHGTLIFGKQGTNANDADLEHVMITDEEEIRTTNPVATEQYGNVSNNLQNSNTGPTTENVNHQGALPGMVWQDRDVYLQGPIWAKIPHTDGHFHPSPLMGGFGLKHPPPQIMIKNTPVPANPPTNFSAAKFASFITQYSTGQVSVEIEWELQKENSKRWNPEIQYTSNYNKSVNVDFTVDTNGVYSEPRPIGTRYLTRNL

SEQ ID NO: 4185 - protein, 735 aa, synthetic construct
  REGION 1..735: note = source = /note="Description of Artificial Sequence: Synthetic polypeptide"
MAADGYLPDWLEDTLSEGIRQWWKLKPGPPPPKPAERHQDDSRGLVLPGYKYLGPFNGLDKGEPVNEADAAALEHDKAYDRQFDSGDNPYLKYNHADAEFQERLKEDTSFGGNLGRAVFQAKKRVLEPLGLVEEPVKTAPGKKRPVEHSPAEPDSSSGTGKAGQQPARKRLNFGQTGDADSVPDPQPLGQPPAAPTSLGSTTMATGSGAPMADNNEGADGVGNSSGNWHCDSQWLGDRVITTSTRTWALPTYNNHLYKQISSQSGASNDNHYFGYSTPWGYFDFNRFHCHFSPRDWQRLINNNWGFRPKRLNFKLFNIQVKEVTQNDGTTTIANNLTSTVQVFTDSEYQLPYVLGSAHQGCLPPFPADVFMVPQYGYLTLNNGSQAVGRSSFYCLEYFPSQMLRTGNNFTFSYTFEDVPFHSSYAHSQSLDRLMNPLIDQYLYYLNRTQSNSGTLQQSRLLFSQAGPTSMSLQAKNWLPGPCYRQQRLSKQANDNNNSNFPWTAATKYHLNGRDSLVNPGPAMASHKDDEEKFFPMHGTLIFGKQGTNANDADLEHVMITDEEEIRTTNPVATEQYGNVSNNLQNSNTGPTTENVNHQGALPGMVWQDRDVYLQGPIWAKIPHTDGHFHPSPLMGGFGLKHPPPQIMIKNTPVPANPPTNFSAAKFASFITQYSTGQVSVEIEWELQKENSKRWNPEIQYTSNYNKSVNVDFTVDTNGVYSEPRPIGTRYLTRNL

SEQ ID NO: 4186 - protein, 735 aa, synthetic construct
  REGION 1..735: note = source = /note="Description of Artificial Sequence: Synthetic polypeptide"
MAADGYLPDWLEDTLSEGIRQWWKLKPGPPPPKPAERHQDDSRGLVLPGYKYLGPFNGLDKGEPVNEADAAALEHDKAYDRQLDSGDNPYLKYNHADAEFQERLKEDTSFGGNLGRAVFQAKKRVLEPLGLVEEPVKTAPGKKRPVEHSPAEPDSSSGTGKAGQQPARKRLNFGQTGDADSVPDPQPLGQPPAAPTSLGSTTMATGSGAPMADNNEGADGVGNSSGNWHCDSQWLGDRVITTSTRTWALPTYNNHLYKQISSQSGASNDNHYFGYSTPWGYFDFNRFHCHFSPRDRQRLINNNWGFRPKRLNFKLFNIQVKEVTQNDGTTTIANNLTSTVQVFTDSEYQLPYVLGSAHQGCLPPFPADVFMVPQYGYLTLNNGSQAVGRSSFYCLEYFPSQMLRTGNNFTFSYTFEDVPFHSSYAHSQSLDRLMNPLIDQYLYYLNRTQSNSGTLQQSRLLFSQAGPTSMSLQAKNWLPGPCYRQQRLSKQANDNNNSNFPWTAATKYHLNGRDSLVNPGPAMASHKDDEEKFFPMHGTLIFGKQGTNANDADLEHVMITDEEEIRTTNPVATEQYGNVSNNLQNSNTGPTTENVNHQGALPGMVWQDRDVYLQGPIWAKIPHTDGHFHPSPLMGGFGLKHPPPQIMIKNTPVPANPPTNFSAAKFASFITQYSTGQVSVEIEWELQKENSKRWNPEIQYTSNYNKSVNVDFTVDTNGVYSEPRPIGTRYLTRNL

SEQ ID NO: 4187 - protein, 735 aa, synthetic construct
  REGION 1..735: note = source = /note="Description of Artificial Sequence: Synthetic polypeptide"
MAADGYLPDWLEDTLSEGIRQWWKLKPGPPPPKPAERHQDDSRGLVLPGYKYLGPFNGLDKGEPVNEADAAALEHDKAYDRQLDSGDNPYLKYNHADAEFQERLKEDTSFGGNLGRAVFQAKKRVLEPLGLVEEPVKTAPGKKRPVEHSPAEPDSSSGTGKAGQQPARKRLNFGQTGDADSVPDPQPLGQPPAAPTSLGSTTMATGSGAPMADNNEGADGVGNSSGNWHCDSQWLGDRVITTSTRTWALPAYNNHLYKQISSQSGASNDNHYFGYSTPWGYFDFNRFHCHFSPRDWQRLINNNWGFRPKRLNFKLFNIQVKEVTQNDGTTTIANNLTSTVQVFTDSEYQLPYVLGSAHQGCLPPFPADVFMVPQYGYLTLNNGSQAVGRSSFYCLEYFPSQMLRTGNNFTFSYTFEDVPFHSSYAHSQSLDRLMNPLIDQYLYYLNRTQSNSGTLQQSRLLFSQAGPTSMSLQAKNWLPGPCYRQQRLSKQANDNNNSNFPWTAATKYHLNGRDSLVNPGPAMASHKDDEEKFFPMHGTLIFGKQGTNANDADLEHVMITDEEEIRTTNPVATEQYGNVSNNLQNSNTGPTTENVNHQGALPGMVWQDRDVYLQGPIWAKIPHTDGHFHPSPLMGGFGLKHPPPQIMIKNTPVPANPPTNFSAAKFASFITQYSTGQVSVEIEWELQKENSKRWNPEIQYTSNYNKSVNVDFTVDTNGVYSEPRPIGTRYLTRNL

SEQ ID NO: 4188 - protein, 734 aa, synthetic construct
  REGION 1..734: note = source = /note="Description of Artificial Sequence: Synthetic polypeptide"
MAADGYLPDWLEDTLSEGIRQWWKLKPGPPPPKPAERHQDDSRGLVLPGYKYLGPFNGLDKGEPVNEADAAALEHDKAYDRQLDSGDNPYLKYNHADAEFQERLKEDTSFGGNLGRAVFQAKKRVLEPLGLVEEPVKTAPGKKRPVEHSPAEPDSSSGTGKAGQQPARKRLNFGQTGDADSVPDPQPLGQPPAAPTSLGSTTMATGSGAPMADNNEGADGVGNSSGNWHCDSQWLGDRVITTSTRTWALPTYNNHLYKQISSQSGASNDNHYFGYSTPWGYFDFNRFHCHFSPRDWQRLINNNWGFRPKRLNFKLFNIQVKEVTQNDGTTTIANNLTSTVQVFTDSEYQLPYVLGSAHQGCLPPFPADAFMVPQYGYLTLNNGSQAVGRSSFYCLEYFPSQMLRTGNNFTFSYTFEDVPFHSSYAHSQSLDRLMNPLIDQYLYYLNRTQSNSGTLQQSRLLFSQAGPTSMSLQAKNWLPGPCYRQQRLSKQANDNNSNFPWTAATKYHLNGRDSLVNPGPAMASHKDDEEKFFPMHGTLIFGKQGTNANDADLEHVMITDEEEIRTTNPVATEQYGNVSNNLQNSNTGPTTENVNHQGALPGMVWQDRDVYLQGPIWAKIPHTDGHFHPSPLMGGFGLKHPPPQIMIKNTPVPANPPTNFSAAKFASFITQYSTGQVSVEIEWELQKENSKRWNPEIQYTSNYNKSVNVDFTVDTNGVYSEPRPIGTRYLTRNL

SEQ ID NO: 4189 - protein, 735 aa, synthetic construct
  REGION 1..735: note = source = /note="Description of Artificial Sequence: Synthetic polypeptide"
MAADGYLPDWLEDTLSEGIRQWWKLKPGPPPPKPAERHQDDSRGLVLPGYKYLGPFNGLDKGEPVNEADAAALEHDKAYDRQLDSGDNPYLKYNHADAEFQERLKEDTSFGGNLGRAVFQAKKRVLEPLGLVEEPVKTAPGKKRPVEHSPAEPDSSSGTGKAGQQPARKRLNFGQTGDADSVPDPQPLGQPPAAPTSLGSTTMATGSGAPMADNNEGADGVGNSSGNWHCDSQWLGDRVITTSTRTWALPTYNNHLYKQISSQSGASNDNHYFGYSTPWGYFDFNRFHCHFSPRGWQRLINNNWGFRPKRLNFKLFNIQVKEVTQNDGTTTIANNLTSTVQVFTDSEYQLPYVLGSAHQGCLPPFPADVFMVPQYGYLTLNNGSQAVGRSSFYCLEYFPSQMLRTGNNFTFSYTFEDVPFHSSYAHSQSLDRLMNPLIDQYLYYLNRTQSNSGTLQQSRLLFSQAGPTSMSLQAKNWLPGPCYRQQRLSKQANDNNNSNFPWTAATKYHLNGRDSLVNPGPAMASHKDDEEKFFPMHGTLIFGKQGTNANDADLEHVMITDEEEIRTTNPVATEQYGNVSNNLQNSNTGPTTENVNHQGALPGMVWQDRDVYLQGPIWAKIPHTDGHFHPSPLMGGFGLKHPPPQIMIKNTPVPANPPTNFSAAKFASFITQYSTGQVSVEIEWELQKENSKRWNPEIQYTSNYNKSVNVDFTVDTNGVYSEPRPIGTRYLTRNL

SEQ ID NO: 4190 - protein, 735 aa, synthetic construct
  REGION 1..735: note = source = /note="Description of Artificial Sequence: Synthetic polypeptide"
MAADGYLPDWLEDTLSEGIRQWWKLKPGPPPPKPAERHQDDSRGLVLPGYKYLGPFNGLDKGEPVNEADAAALEHDKAYDRQLDSGDNPYLKYNHADAEFQERLKEDTSFGGNLGRAVFQAKKRVLEPLGLVEEPVKTAPGKKRPVEHSPAEPDSSSGTGKAGQQPARKRLNFGQTGDADSVPDPQPLGQPPAAPTSLGSTTMATGSGAPMADNNEGADGVGNSSGNWHCDSQWLGDRVITTSTRTWALPTYNNHLYKQISSQSGASNDNHYFGYSTPWGYFDFNRFHCHFSPRDWQRLINNNWGFRPKRLNFKLFNIQVKEVTQNDGTTTIANNLTSTVQVFTDSEYQLPYVLGSAHQGCLPPFPADVFMVPQYGYLTLNNGSQAVGRSSFYCLEYFPSQMLRTGNNFTFSYTFEDVPFHSSYAHSQSLDRLMNPLIDQYLYYLNGTQSNSGTLQQSRLLFSQAGPTSMSLQAKNWLPGPCYRQQRLSKQANDNNNSNFPWTAATKYHLNGRDSLVNPGPAMASHKDDEEKFFPMHGTLIFGKQGTNANDADLEHVMITDEEEIRTTNPVATEQYGNVSNNLQNSNTGPTTENVNHQGALPGMVWQDRDVYLQGPIWAKIPHTDGHFHPSPLMGGFGLKHPPPQIMIKNTPVPANPPTNFSAAKFASFITQYSTGQVSVEIEWELQKENSKRWNPEIQYTSNYNKSVNVDFTVDTNGVYSEPRPIGTRYLTRNL

SEQ ID NO: 4191 - protein, 735 aa, synthetic construct
  REGION 1..735: note = source = /note="Description of Artificial Sequence: Synthetic polypeptide"
MAADGYLPDWLEDTLSEGIRQWWKLKPGPPPPKPAERHQDDSRGLVLPGYKYLGPFNGLDKGEPVNEADAAALEHDKAYDRQLDSGDNPYLKYNHADAEFQERLKEDTSFGGNLGRAVFQAKKRVLEPLGLVEEPVKTAPGKKRPVEHSPAEPDSSSGTGKAGQQPARKRLNFGQTGDADSVPDPQPLGQPPAAPTSLGSTTMATGSGAPMADNNEGADGVGNSSGNWHCDSQWLGDRVITTSTRTWALPTYNNHLYKQISSQSGASNDNHYFGYSTPWGYFDFNRFHCHLSPRDWQRLINNNWGFRPKRLNFKLFNIQVKEVTQNDGTTTIANNLTSTVQVFTDSEYQLPYVLGSAHQGCLPPFPADVFMVPQYGYLTLNNGSQAVGRSSFYCLEYFPSQMLRTGNNFTFSYTFEDVPFHSSYAHSQSLDRLMNPLIDQYLYYLNRTQSNSGTLQQSRLLFSQAGPTSMSLQAKNWLPGPCYRQQRLSKQANDNNNSNFPWTAATKYHLNGRDSLVNPGPAMASHKDDEEKFFPMHGTLIFGKQGTNANDADLEHVMITDEEEIRTTNPVATEQYGNVSNNLQNSNTGPTTENVNHQGALPGMVWQDRDVYLQGPIWAKIPHTDGHFHPSPLMGGFGLKHPPPQIMIKNTPVPANPPTNFSAAKFASFITQYSTGQVSVEIEWELQKENSKRWNPEIQYTSNYNKSVNVDFTVDTNGVYSEPRPIGTRYLTRNL

SEQ ID NO: 4192 - protein, 735 aa, synthetic construct
  REGION 1..735: note = source = /note="Description of Artificial Sequence: Synthetic polypeptide"
MAADGYLPDWLEDTLSEGIRQWWKLKPGPPPPKPAERHQDDSRGLVLPGYKYLGPFNGLDKGEPVNEADAAALGHDKAYDRQLDSGDNPYLKYNHADAEFQERLKEDTSFGGNLGRAVFQAKKRVLEPLGLVEEPVKTAPGKKRPVEHSPAEPDSSSGTGKAGQQPARKRLNFGQTGDADSVPDPQPLGQPPAAPTSLGSTTMATGSGAPMADNNEGADGVGNSSGNWHCDSQWLGDRVITTSTRTWALPTYNNHLYKQISSQSGASNDDHYFGYSTPWGYFDFNRFHCHFSPRDWQRLINNNWGFRPKRLNFKLFNIQVKEVTQNDGTTTIANNLTSTVQVFTDSEYQLPYVLGSAHQGCLPPFPADVFMVPQYGYLTLNNGSQAVGRSSFYCLEYFPSQMLRTGNNFTFSYTFEDVPFHSSYAHSQSLDRLMNPLIDQYLYYLNRTQSNSGTLQQSRLLFSQAGPTSMSLQAKNWLPGPCYRQQRLSKQANDNNNSNFPWTAATKYHLNGRDSLVNPGPAMASHKDDEEKFFPMHGTLIFGKQGTNANDADLEHVMITDEEEIRTTNPVATEQYGNVSNNLQNSNTGPTTENVNHQGALPGMVWQDRDVYLQGPIWAKIPHTDGHFHPSPLMGGFGLKHPPPQIMIKNTPVPANPPTNFSAAKFASFITQYSTGQVSVEIEWELQKENSKRWNPEIQYTSNYNKSVNVDFTVDTNGVYSEPRPIGTRYLTRNL

SEQ ID NO: 4193 - protein, 735 aa, synthetic construct
  REGION 1..735: note = source = /note="Description of Artificial Sequence: Synthetic polypeptide"
MAADGYLPDWLEDTLSEGIRQWWKLKPGPPPPKPAERHQDDSRGLVLPGYKYLGPFNGLDKGEPVNEADAAALEHDKAYDRQLDSGDNPYLKYNHADAEFQERLKEDTSFGGNLGRAVFQAKKRVLEPLGLVEEPVKTAPGKKRPVEHSPAEPDSSSGTGKAGQQPARKRLNFGQTGDADSVPDPQPLGQPPAAPTSLGSTTMATGSGAPMADNNEGADGVGNSSGNWHCDSQWLGDRVITTSTRTWALPTYNNHLYKQISSQSGASNDNHYFGYSTPWGYFDFNRFHCHFSPRDWQRLINNNWGFRPKRLNFKLFNIQVKEVTQNDGTTTIANNLTSTVQVFTDSEYQLPYVLGSAHQGCLPPFPADVFMVPQYGYLTLNNGSQAVGRSSFYCLEYFPSQMLRTGNNFTFSYTFEDVPFHSSYAHSQSLDRLMNPLIDQYLYYLNRTQSNSGTLQQSRLLFSQAGPTSMSLQAKNWLPGPCYRQQRLSKQANDNNNSNFPWTAATKYHLNGRDSLVNPGPAMASHKDDEEKFFPMHGTLIFGKQGTNANDADLEHVMITDEEEIRTTNPVATEQYGNVSNNLQNSNTGPTTENVNHQGALPGMVWQDRDVYLQGPIWAKIPHTDGHFRPSPLMGGFGLKHPPPQIMIKNTPVPANPPTNFSAAKFASFITQYSTGQVSVEIEWELQKENSKRWNPEIQYTSNYNKSVNVDFTVDTNGVYSEPRPIGTRYLTRNL

SEQ ID NO: 4194 - protein, 735 aa, synthetic construct
  REGION 1..735: note = source = /note="Description of Artificial Sequence: Synthetic polypeptide"
MAADGYLPDWLEDTLSEGIRQWWKLKPGPPPPKPAERHQDDSRGLVLPGYKYLGPFNGLDKGEPVNEADAAALEHDKAYDRQLDSGDNPYLKYNHADAEFQERLKEDTSFGGNLGRAVFQAKKRVLEPLGLVEEPVKTAPGKKRPVEHSPAEPDSSSGTGKAGQQPARKRLNFGQTGDADSVPDPQPLGQPPAAPTSLGSTTMATGSGAPMADNNEGADGVGNSSGNWHCDSQWLGDRVITTSTRTWALPTYNNHLYKQISSQSGASNDNHYFGYSTPWGYFDFNRFHCHFSPRDWQRLINNNWGFRPKRLNFKLFNIQVKEVTQNDGTTTIANNLTSTVQVFTDSEYQLPYVLGSAHQGCLPPFPADVFMVPQYGYLTLNNGSQAVGRSSFYCLEYFPSQMLRTGNNFTFSYTFEDVPFHSSYAHSQSLDRLMNPLIDQYLYYLNRTQSNSGTLQQSRLLFSQAGPTSMSLQAKNWLPGPCYRQQRLSKQANDNNNSNFPWTAATKYHLNGRDSLVNPGPAMASHKDDEEKFFPMHGTLIFGKQGTNANDADLEHVMITDEEEIRTTNPVATEQYGNVSNNLQNSNTGPTTENVNHQGALPGMVWQDRDVYLQGPIWAKIPHTDGHFHPSPLMGGFGLKHPPPQIMIKNTPVPANPPTNFSAAKSASFITQYSTGQVSVEIEWELQKENSKRWNPEIQYTSNYNKSVNVDFTVDTNGVYSEPRPIGTRYLTRNL

SEQ ID NO: 4195 - protein, 735 aa, synthetic construct
  REGION 1..735: note = source = /note="Description of Artificial Sequence: Synthetic polypeptide"
MAADGYLPDWLEDTLSEGIRQWWKLKPGPPPPKPAERHQDDSRGLVLPGYKYLGPFNGLDKGEPVNEADAAALEHDKAYDRQLDSGDNPYLKYNHADAEFQERLKEDTSFGGNLGRAVFQAKKRVLEPLGLVEEPVKTAPGKKRPVEHSPAEPDSSSGTGKAGQQPARKRLNFGQTGDADSVPDPQPLGQPPAAPTSLGSTTMATGSGAPMADNNEGADGVGNSSGNWHCDSQWLGDRVITTSTRTWALPTYNNHLYKQISSQSGASNDNHYFGYSTPWGYFDFNRFHCHFSPRDWQRLINNNWGFRPKRLNFKLFNIQVKGVTQNDGTTTIANNLTSTVQVFTDSEYQLPYVLGSAHQGCLPPFPADVFMVPQYGYLTLNNGSQAVGRSSFYCLEYFPSQMLRTGNNFTFSYTFEDVPFHSSYAHSQSLDRLMNPLIDQYLYYLNRTQSNSGTLQQSRLLFSQAGPTSMSLQAKNWLPGPCYRQQRLSKQANDNNNSNFPWTAATKYHLNGRDSLVNPGPAMASHKDDEEKFFPMHGTLIFGKQGTNANDADLEHVMITDEEEIRTTNPVATEQYGNVSNNLQNSNTGPTTENVNHQGALPGMVWQDRDVYLQGPIWAKIPHTDGHFHPSPLMGGFGLKHPPPQIMIKNTPVPANPPTNFSAAKFASFITQYSTGQVSVEIEWELQKENSKRWNPEIQYTSNYNKSVNVDFTVDTNGVYSEPRPIGTRYLTRNL

SEQ ID NO: 4196 - protein, 735 aa, synthetic construct
  REGION 1..735: note = source = /note="Description of Artificial Sequence: Synthetic polypeptide"
MAADGYLPDWLEDTLSEGIRQWWKLKPGPPPPKPAERHQDDSRGLVLPGYKYLGPFNGLDKGEPVNEADAAALEHDKAYDRQLDSGDNPYLKYNHADAEFQERLKEDTSFGGNLGRAVFQAKKRVLEPLGLVEEPVKTAPGKKRPVEHSPAEPDSSSGTGKAGQQPARKRLNFGQTGDADSVPDPQPLGQPPAAPTSLGSTTMATGSGAPMADNNEGADGVGNSSGNWHCDSQWLGDRVITTSTRTWALPTYNNHLYKQISSQSGASNDNHYFGYSTPWGYFDFNRFHCHFSPRDWQRLINNNWGFRPKRLNFKLFNIQVKEVTQNDGTTTIANNLTSTVQVFTDSEYQLPYVLGSAHQGCLPPFPADVFMVPQYGYLTLNNGSQAVGRSSFYCLEYFPSQMLRTGNNFTFSYTFEDVPFHSSYAHSQSLDRLMNPLIDQYLYYLNRTQSNSGTLQQSRLLFSQAGPTSMSLQAKNWLPGPCYRQQRLSKQANDNNNSNFPWTAATKYHLNGRDSLVNPGPAMASHKDDEEKFFPMHGTPIFGKQGTNANDADLEHVMITDEEEIRTTNPVATEQYGNVSNNLQNSNTGPTTENVNHQGALPGMVWQDRDVYLQGPIWAKIPHTDGHFHPSPLMGGFGLKHPPPQIMIKNTPVPANPPTNFSAAKFASFITQYSTGQVSVEIEWELQKENSKRWNPEIQYTSNYNKSVNVDFTVDTNGVYSEPRPIGTRYLTRNL

SEQ ID NO: 4197 - protein, 735 aa, synthetic construct
  REGION 1..735: note = source = /note="Description of Artificial Sequence: Synthetic polypeptide"
MAADGYLPDWLEDTLSEGIRQWWKLKPGPPPPKPAERHQDDSRGLVLPGYKYLGPFNGLDKGEPVNEADAAALEHDKAYDRQLDSGDNPYLKYNHADAEFQERLKEDTSFGGNLGRAVFQAKKGVLEPLGLVEEPVKTAPGKKRPVEHSPAEPDSSSGTGKAGQQPARKRLNFGQTGDADSVPDPQPLGQPPAAPTSLGSTTMATGSGAPMADNNEGADGVGNSSGNWHCDSQWLGDRVITTSTRTWALPTYNNHLYKQISSQSGASNDNHYFGYSTPWGYFDFNRFHCHFSPRDWQRLINNNWGFRPKRLNFKLFNIQVKEVTQNDGTTTIANNLTSTVQVFTDSEYQLPYVLGSAHQGCLPPFPADVFMVPQYGYLTLNNGSQAVGRSSFYCLEYFPSQMLRTGNNFTFSYTFEDVPFHSSYAHSQSLDRLMNPLIDQYLYYLNRTQSNSGTLQQSRLLFSQAGPTSMSLQAKNWLPGPCYRQQRLSKQANDNNNSNFPWTAATKYHLNGRDSLVNPGPAMASHKDDEEKFFPMHGTLIFGKQGTNANDADLEHVMITDEEEIRTTNPVATEQYGNVSNNLQNSNTGPTTENVNHQGALPGMVWQDRDVYLQGPIWAKIPHTDGHFHPSPLMGGFGLKHPPPQIMIKNTPVPANPPTNFSAAKFASFITQYSTGQVSVEIEWELQKENSKRWNPEIQYTSNYNKSVNVDFTVDTNGVYSEPRPIGTRYLTRNL

SEQ ID NO: 4198 - protein, 735 aa, synthetic construct
  REGION 1..735: note = source = /note="Description of Artificial Sequence: Synthetic polypeptide"
MAADGYLPDWLEDTLSEGIRQWWKLKPGPPPPKPAERHQDDSRGLVLPGYKYLGPFNGLDKGEPVNEADAAALEHDKAYDRQLDSGDNPYLKYNHADAEFQERLKEDTSFGGNLGRAVFQAKKRVLEPLGLVEEPVKTAPGKKRPVEHSPAEPDSSSGTGKAGQQPARKRLNFGQTGDADSVPDPQPLGQPPAAPTSLGSTTMATGSGAPMADNNEGADGVGNSSGNWHCDSQWLGDRVITTSTRTWALPTYNNHLYKQISSQSGASNDNHYFGYSTPWGYFDFNRFHCHFSPRDWQRLINNNWGFRPKRLNFKLFNIQVKEVTQNDGTTTIANNLTSTVQVFTDSEYQLPYVLGSAHQGCLPPFPADVFMVPQYGYLTLNNGSQAVGRSSFYCLEYFPSQMLRTGNNFTFSYTFEDVPFHSSYAHSQSLDRLMNPLIGQYLYYLNRTQSNSGTLQQSRLLFSQAGPTSMSLQAKNWLPGPCYRQQRLPKQANDNNNSNFPWTAATKYHLNGRDSLVNPGPAMASHKDDEEKFFPMHGTLIFGKQGTNANDADLEHVMITDEEEIRTTNPVATEQYGNVSNNLQNSNTGPTTENVNHQGALPGMVWQDRDVYLQGPIWAKIPHTDGHFHPSPLMGGFGLKHPPPQIMIKNTPVPANPPTNFSAAKFASFITQYSTGQVSVEIEWELQKENSKRWNPEIQYTSNYNKSVNVDFTVDTNGVYSEPRPIGTRYLTRNL

SEQ ID NO: 4199 - protein, 735 aa, synthetic construct
  REGION 1..735: note = source = /note="Description of Artificial Sequence: Synthetic polypeptide"
MAADGYLPDWLEDTLSEGIRQWWKLKPGPPPPKPAERHQDDSRGLVLPGYKYLGPFNGLDKGEPVNEADAAALEHDKAYDRQLDSGDNPYLKYNHADAEFQERLKEDTSFGGNLGRAVFQAKKRVLEPLGLVEEPVKTAPGKKRPVEHSPAEPDSSSGTGKAGQQPARKRLNFGQTGDADSVPDPQPLGQPPAAPTSLGSTTMATGSGAPMADNNEGADGVGNSSGNWHCDSQWLGDRVITTSTRTWALPTYNNHLYKQISSQSGASNDNHYFGYSTPWGYFDFNRFHCHFSPRDWQRLINNNWGFRPKRLNFKLFNIQVKEVTQNDGTTTIANNLTSTVQVFTDSEYQLPYVLGSAHQGCLPPFPADVFMVPQYGYLTLNNGSQAVGRSSFYCLEYFPSQMLRTGNNFTFSYTFEDVPFHSSYAHSQSLDRLMNPLIDQYLYYLNRTQSNSGTLQQSRLLFSQAGPTSMSLQAKNWLPGPCYRQQRLSKQANDNNNSNFPWTAATKYHLNGRDSLVNPGPAMASHKDDEEKFFPMHGTLIFGKQGTNANDADLEHVMITDEEEIRTTNPVATEQYGNVSNNLQNSNTGPTTENVNHQGALPGMVWQDRDVYLQGPIWAKIPHTDGRFHPSPLMGGFGLKHPPPQIMIKNTPVPANPPTNFSAAKFASFITQYSTGQVSVEIEWELQKENSKRWNPEIQYTSNYNKSVNVDFTVDTNGVYSEPRPIGTRYLTRNL

SEQ ID NO: 4200 - protein, 735 aa, synthetic construct
  REGION 1..735: note = source = /note="Description of Artificial Sequence: Synthetic polypeptide"
MAADGYLPDWLEDTLSEGIRQWWKLKPGPPPPKPAERHQDDSRGLVLPGYKYLGPFNGLDKGEPVNEADAAALEHDKAYDRQLDSGDNPYLKYNHADAEFQERLKEDTSFGGNLGRAVFQAKKRVLEPLGLVEEPVKTAPGKKRPVEHSPAEPDSSSGTGKAGQQPARKRLNFGQTGDADSVPDPQPLGQPPAAPTSLGSTTMATGSGAPMADNNEGADGVGNSSGNWHCDSQWLGDRVITTSTRTWALPTYNNHLYKQISSQSGASNDNHYFGYSTPWGYFDFNRFHCHFSPRDWQRLINNNWGFRPKRLNFKLFNIQVKEVTQNDGTTTIANNLTSTVQVFTDSEYQLPYVLGSAHQGCLPPFPADVFMVPQYGYLTLNNGSQAVGRSSFYCLEYFPSQMLRTGNNFTFSYTFEDVPFHSSYAHSQSLDRLMNPLIDQYLYYLNRTQSNSGTLQQSRLLFSQAGPTSMSLQAKNWLPGPCYRQQRLSKQANDNNNSNFPWTAATKYHLNGRDSLVNPGPAMASHKDDEEKFFPMHGALIFGKQGTNANDADLEHVMITDEEEIRTTNPVATEQYGNVSNNLQNSNTGPTTENVNHQGALPGMVWQDRDVYLQGPIWAKIPHTDGHFHPSPLMGGFGLKHPPPQIMIKNTPVPANPPTNFSAAKFASFITQYSTGQVSVEIEWELQKENSKRWNPEIQYTSNYNKSVNVDFTVDTNGVYSEPRPIGTRYLTRNL

SEQ ID NO: 4201 - protein, 735 aa, synthetic construct
  REGION 1..735: note = source = /note="Description of Artificial Sequence: Synthetic polypeptide"
MAADGYLPDWLEDTLSEGIRQWWKLKPGPPPPKPAERHQDDSRGLVLPGYKYLGPFNGLDKGEPVNEADAAALEHDKAYDRQLDSGDNPYLKYNHADAEFQERLKEDTSFGGNLGRAVFQAKKRVLEPLGLVEEPVKTAPGKKRPVEHSPAEPDSSSGTGKAGQQPARKRLNFGQTGDADSVPDPQPLGQPPAAPTSLGSTTMATGSGAPMADNNEGADGVGNSSGNWHCDSQWLGDRVITTSTRTWALPTYNNHLYKQISSQSGASNDNHYFGYSTPWGYFDFNRFHCHFSPRDWQRLINNNWGFRPKRLNFKLFNIQVKEVTQNDGTTTIANNLTSTVQVFTDSEYQLPYVLGSAHQGCLPPFPADVFMVPQYGYLTLNNGSQAVGRSSFYCLEYFPSQMLRTGNNFTFSYTFEDVPFHSSYAHSQSLDRLMNPLIDQYLYYLNRTQSNSGTLQQSRLLFSQAGPTSMSLQAKNWLPGPCYRQQRLSKQANDNNNSNFPWTAATKYHLNGRDSLVNPGPAMASHKDDEEKFFPMHGTLIFGKQGTNANDADLEHAMITDEEEIRTTNPVATEQYGNVSNNLQNSNTGPTTENVNHQGALPGMVWQDRDVYLQGPIWAKIPHTDGHFHPSPLMGGFGLKHPPPQIMIKNTPVPANPPTNFSAAKFASFITQYSTGQVSVEIEWELQKENSKRWNPEIQYTSNYNKSVNVDFTVDTNGVYSEPRPIGTRYLTRNL

SEQ ID NO: 4202 - protein, 735 aa, synthetic construct
  REGION 1..735: note = source = /note="Description of Artificial Sequence: Synthetic polypeptide"
MAADGYLPDWLEDTLSEGIRQWWKLKPGPPPPKPAERHQDDSRGLVLPGYKYLGPFNGLDKGEPVNEADAAALEHDKAYDRQLDSGDNPYLKYNHADAEFQERLKEDTSFGGNLGRAVFQAKKRVLEPLGLVEEPVKTAPGKKRPVEHSPAEPDSSSGTGKAGQQPARKRLNFGQTGDADSVPDPQPLGQPPAAPTSLGSTTMATGSGAPMADNNEGADGVGNSSGNWHCDSQWLGDRVITTSTRTWALPTYNNHLYKQISSQSGASNDNHYFGYSTPWGYFDFNRFHCHFSPRDWQRLINNNWGFRPKRLNFKLFNIQVKEVTQNDGTTTIANNLTSTVQVFTDSEYQLPYVLGSAHQGCLPPFPADVFMVPQYGYLTLNNGSQAVGRSSFYCLEYFPSQMLRTGNNFTFSYTFEDVPFHSSYAHSQSLDRLMNPLIDQYLYYLNRTQSNSGTLQQSRLLFSQAGPTSMSLQAKNWLPGPCYRQQRLSKQANDNNNSNFPWTAATKYHLNGRDSLVNPGPAMASHKDDEEKFFPMHGTLIFGKQGTNANDADLEHVMITDEEEIRTTNPVATEQYGNVSNNLQNSNTGPTTENVNHQGALPGMVWQDRDVYLQGPIWAKIPHTDGHFHPSPLMGGFGLKHPPPQIMIKNTPVPANPPTNFSAAKFASFITQYSTGQVSVEIEWELQKENSKRWNPEIRYTSNYNKSVNVDFTVDTNGVYSEPRPIGTRYLTRNL

SEQ ID NO: 4203 - protein, 735 aa, synthetic construct
  REGION 1..735: note = source = /note="Description of Artificial Sequence: Synthetic polypeptide"
MAADGYLPDWLEDTLSEGIRQWWKLKPGPPPPKPAERHQDDSRGLVLPGYKYLGPFNGLDKGEPVNEADAAALEHDKAYDRQLDSGDNPYLKYNHADAEFQERLKEDTSFGGNLGRAVFQAKKRVLEPLGLVEEPVKTAPGKKRPVEHSPAEPDSSSGTGKAGQQPARKRLNFGQTGDADSVPDPQPLGQPPAAPTSLGSTTMATGSGAPMADNNEGADGVGNSSGNWHCDSQWLGDRVITTSTRTWALPTYNNHLYKQISSQSGASNDNHYFGYSTPWGYFDFNRFHCHFSPRDWQRLINNNWGFRPKRLNFKLFNIQVKEVTQNDGTTTIANNLTSTVQVFTDSEYQLPYVLGSAHQGCLPPFPADVFMVPQYGYLTLNNGSQAVGRSSFYCLEYFPSQMLRTGNNFTFSYTFEDVPFHSSYAHSQSLDRLMNPLIDQYLYYLNRTQSNSGTLQQSRLLFSQAGPTSMSLQAKNWLPGPCYRQQRLSKQANDNNNSNFPRTAATKYHLNGRDSLVNPGPAMASHKDDEEKFFPMHGTLIFGKQGTNANDADLEHVMITDEEEIRTTNPVATEQYGNVSNNLQNSNTGPTTENVNHQGALPGMVWQDRDVYLQGPIWAKIPHTDGHFHPSPLMGGFGLKHPPPQIMIKNTPVPANPPTNFSAAKFASFITQYSTGQVSVEIEWELQKENSKRWNPEIQYTSNYNKSVNVDFTVDTNGVYSEPRPIGTRYLTRNL

SEQ ID NO: 4204 - protein, 735 aa, synthetic construct
  REGION 1..735: note = source = /note="Description of Artificial Sequence: Synthetic polypeptide"
MAADGYLPDWLEDTLSEGIRQWWKLKPGPPPPKPAERHQDDSRGLVLPGYKYLGPFNGLDKGEPVNEADAAALEHDKAYDRQLDSGDNPYLKYNHADAEFQERLKEDTSFGGNLGRAVFQAKKRVLEPLGLVEEPVKTAPGKKRPVEHSPAEPDSSSGTGKAGQQPARKRLNFGQTGDADSVPDPQPLGQPPAAPTSLGSTTMATGSGAPMADNNEGADGVGNSSGNWHCDSQWLGDRVITTSTRTWALPTYNNHLYKQISSQSGASNDNHYFGYSTPWGYFDFNRFHCHFSPRDWQRLINNNWGFRPKRLNFKLFNIQVKEVTQNDGTTTIANNLTSTVQVFTDSEYQLPYVLGSAHQGCLPPFPADVFMVPQYGYLTLNNGSQAVGRSSFYCLEYFPSQMLRTGNNFTFSYTFEDVPFHSSYAHSQSLDRLMNPLIGQYLYYLNRTQSNSGTLQQSRLLFSQAGPTSMSLQAKNWLPGPCYRQQRLSKQANDNNNSNFPWTAATKYHLNGRDSLVNPGPAMASHKDDEEKFFPMHGTLIFGKQGTNANDADLEHVMITDEEEIRTTNPVATEQYGNVSNNLQNSNTGPTTENVNHQGALPGMVWQDRDVYLQGPIWAKIPHTDGHFHPSPLMGGFGLKHPPPQIMIKNTPVPANPPTNFSAAKFASFITQYSTGQVSVEIEWELQKENSKRWNPEIQYTSNYNKSVNVDFTVDTNGVYSEPRPIGTRYLTRNL

SEQ ID NO: 4205 - protein, 735 aa, synthetic construct
  REGION 1..735: note = source = /note="Description of Artificial Sequence: Synthetic polypeptide"
MAADGYLPDWLEDTLSEGIRQWWKLKPGPPPPKPAERHQDDSRGLVLPGYKYLGPFNGLDKGEPVNEADAAALEHDKAYDRQLDSGDNPYLKYNHADAEFQERLKEDTSFGGNLGRAVFQAKKRVLEPLGLVEEPVKTAPGKKRPVEHSPAEPDSSSGTGKAGQQPARKRLNFGQTGDADSVPDPQPLGQPPAAPTSLGSTTMATGSGAPMADNNEGADGVGNSSGNWHCDSQWLGDRVITTSTRTWALPTYNNHLYKQISSQSGASNDNHYFGYSTPWGYFDFNRFHCHFSPRDWQRLINNNWGFRPKRLNFKLFNIQVKEVTQNDGTTTIANNLTSTVQVFTDSEYQLPYVLGSAHQGCLPPFPADVFMVPQYGYLTLNNGSQAVGRSSFYCLEYFPSQMLRTGNNFTFSYTFEDVPFHSSYAHSQSLDRLMNPLIDQYLYYLNRTQSNSGTLQQSRLLFSQAGPTSMSLQAKNWLPGPCYRQQRLSKQANDNNNSNFPWTAATKYHLNGRDSLVNPGPAMASHKDDEEKFFPMHGTLIFGKQGTNANDADLEHVMITDEEEIRTTNPVATEQYGNVSNNLQNSNTGPTTENVNHQGALPGMVWQDRDVYLQGPIWAKIPHTDGHFHPSPLMGGFGLKHPPPQIMIKNTPVPANPPTNFSAAKFASFITQYSTGQVGVEIEWELQKENSKRWNPEIQYTSNYNKSVNVDFTVDTNGVYSEPRPIGTRYLTRNL

SEQ ID NO: 4206 - protein, 735 aa, synthetic construct
  REGION 1..735: note = source = /note="Description of Artificial Sequence: Synthetic polypeptide"
MAADGYLPDWLEDTLSEGIRQWWKLKPGPPPPKPAERHQDDSRGLVLPGYKYLGPFNGLDKGEPVNEADAAALEHDKAYDRQLDSGDNPYLKYNHADAEFQERLKEDTSFGGNLGRAVFQAKKRVLEPLGLVEEPVKTAPGKKRPVEHSPAEPDSSSGTGKAGQQPARKRLNFGQTGDADSVPDPQPLGQPPAAPTSLGSTTMATGSGAPMADNNEGADGVGNSSGNWHCDSQWLGDRAITTSTRTWALPTYNNHLYKQISSQSGASNDNHYFGYSTPWGYFDFNRFHCHFSPRDWQRLINNNWGFRPKRLNFKLFNIQVKEVTQNDGTTTIANNLTSTVQVFTDSEYQLPYVLGSAHQGCLPPFPADVFMVPQYGYLTLNNGSQAVGRSSFYCLEYFPSQMLRTGNNFTFSYTFEDVPFHSSYAHSQSLDRLMNPLIDQYLYYLNRTQSNSGTLQQSRLLFSQAGPTSMSLQAKNWLPGPCYRQQRLSKQANDNNNSNFPWTAATKYHLNGRDSLVNPGPAMASHKDDEEKFFPMHGTLIFGKQGTNANDADLEHVMITDEEEIRTTNPVATEQYGNVSNNLQNSNTGPTTENVNHQGALPGMVWQDRDVYLQGPIWAKIPHTDGHFHPSPLMGGFGLKHPPPQIMIKNTPVPANPPTNFSAAKFASFITQYSTGQVSVEIEWELQKENSKRWNPEIQYTSNYNKSVNVDFTVDTNGVYSEPRPIGTRYLTRNL

SEQ ID NO: 4207 - protein, 735 aa, synthetic construct
  REGION 1..735: note = source = /note="Description of Artificial Sequence: Synthetic polypeptide"
MAADGYLPDWLEDTLSEGIRQWWKLKPGPPPPKPAERHQDDSRGLVLPGYKYLGPFNGLDKGEPVNEADAAALEHDKAYDRQLDSGDNPYLKYNHADAEFQERLKEDTSFGGNLGRAVFQAKKRVLEPLGLVEEPVKTAPGKKRPVEHSPAEPDSSSGTGKAGQQPARKRLNFGQTGDAGSVPDPQPLGQPPAAPTSLGSTTMATGSGAPMADNNEGADGVGNSSGNWHCDSQWLGDRVITTSTRTWALPTYNNHLYKQISSQSGASNDNHYFGYSTPWGYFDFNRFHCHFSPRDWQRLINNNWGFRPKRLNFKLFNIQVKEVTQNDGTTTIANNLTSTVQVFTDSEYQLPYVLGSAHQGCLPPFPADVFMVPQYGYLTLNNGSQAVGRSSFYCLEYFPSQMLRTGNNFTFSYTFEDVPFHSSYAHSQSLDRLMNPLIDQYLYYLNRTQSNSGTLQQSRLLFSQAGPTSMSLQAKNWLPGPCYRQQRLSKQANDNNNSNFPWTAATKYHLNGRDSLVNPGPAMASHKDDEEKFFPMHGTLIFGKQGTNANDADLEHVMITDEEEIRTTNPVATEQYGNVSNNLQNSNTGPTTENVNHQGALPGMVWQDRDVYLQGPIWAKIPHTDGHFHPSPLMGGFGLKHPPPQIMIKNTPVPANPPTNFSAAKFASFITQYSTGQVSVEIEWELQKENSKRWNPEIQYTSNYNKSVNVDFTVDTNGVYSEPRPIGTRYLTRNL

SEQ ID NO: 4208 - protein, 735 aa, synthetic construct
  REGION 1..735: note = source = /note="Description of Artificial Sequence: Synthetic polypeptide"
MAADGYLPDWLEDTLSEGIRQWWKLKPGPPPPKPAERHQDDSRGLVLPGYKYLGPFNGLDKGEPVNEADAAALEHDKAYDRQLDSGDSPYLKYNHADAEFQERLKEDTSFGGNLGRAVFQAKKRVLEPLGLVEEPVKTAPGKKRPVEHSPAEPDSSSGTGKAGQQPARKRLNFGQTGDADSVPDPQPLGQPPAAPTSLGSTTMATGSGAPMADNNEGADGVGNSSGNWHCDSQWLGDRVITTSTRTWALPTYNNHLYKQISSQSGASNDNHYFGYSTPWGYFDFNRFHCHFSPRDWQRLINNNWGFRPKRLNFKLFNIQVKEVTQNDGTTTIANNLTSTVQVFTDSEYQLPYVLGSAHQGCLPPFPADVFMVPQYGYLTLNNGSQAVGRSSFYCLEYFPSQMLRTGNNFTFSYTFEDVPFHSSYAHSQSLDRLMNPLIDQYLYYLNRTQSNSGTLQQSRLLFSQAGPTSMSLQAKNWLPGPCYRQQRLSKQANDNNNSNFPWTAATKYHLNGRDSLVNPGPAMASHKDDEEKFFPMHGTLIFGKQGTNANDADLEHVMITDEEEIRTTNPVATEQYGNVSNNLQNSNTGPTTENVNHQGALPGMVWQDRDVYLQGPIWAKIPHTDGHFHPSPLMGGFGLKHPPPQIMIKNTPVPANPPTNFSAAKFASFITQYSTGQVSVEIEWELQKENSKRWNPEIQYTSNYNKSVNVDFTVDTNGVYSEPRPIGTRYLTRNL

SEQ ID NO: 4209 - protein, 735 aa, synthetic construct
  REGION 1..735: note = source = /note="Description of Artificial Sequence: Synthetic polypeptide"
MAADGYLPDWLEDTLSEGIRQWWKLKPGPPPPKPAERHQDDSRGLVLPGYKYLGPFNGLDKGEPVNEADAAALEHDKAYDRQLDSGDNPYLKYNHADAEFQERLKEDTSFGGNLGRAVFQAKKRVLEPLGLVEEPVKTAPGKKRPVEHSPAEPDSSSGTGKAGQQPARKRLNFGQTGDADSVPDPQPLGQPPAAPTSLGSTTMATGSGAPMADNNEGADGVGNSSGNWHCDSQWLGDRVITTSTRTWALPTYNNHLYKQISSQSGASNDNHYFGYSTPWGYFDFNRFHCHFSPRDWQRLINNNWGFRPKRLNFKLFNIQVKEVTQNDGTTTIANNLTSTVQVFTDSEYQLPYVLGSAHQGCLPPFPADVFMVPQYGYLTLNNGSQAVGRSSFYCLEYFPSQMLRTGNNFTFSYTFEDVPFHSSYAHSQSLDRLMNPLIDQYLYYLNRTQSNSGTLQQSRLLFSQAGPTSMSLQAKNWLPGPCYRQQRLSKQANDNNNSNFPWTAATKYHLNGRDSLVNPGPAMASHKDDEEKFFPMHGTLIFGKQGTNANDADLEHVMITDEEEIRTTNPVATEQYGNVSNNLQNSNTGPTTENVNHQGALPGMVWQDRDVYLQGPIWAKIPHTDGHFHPSPLMGGFGLKHPPPQIMIKNTPVPANPPTNFSAAKFASFITQYSTGQVSVEIEWELQKENSKRWNPEIQYTSNYNKSVNVDFTVDTNGVYSEPRPIGTRYLTRNP

SEQ ID NO: 4210 - protein, 735 aa, synthetic construct
  REGION 1..735: note = source = /note="Description of Artificial Sequence: Synthetic polypeptide"
MAADGYLPDWLEDTLSEGIRQWWKLKPGPPPPKPAERHQDDSRGLVLPGYKYLGPFNGLDKGEPVNEADAAALEHDKAYDRQLDSGDNPYLKYNHADAEFQERLKEDTSFGGNLGRAVFQAKKRVLEPLGLVEEPVKTAPGKKRPVEHSPAEPDSSSGTGKAGQQPARKRLNFGQTGDADSVPDPQPLGQPPAAPTSLGSTTMATGSGAPMADNNEGADGVGNSSGNWHCDSQWLGDRVITTSTRTWALPTYNNHLYKQISSQSGASNDNHYFGYSTPWGYFDFNRFHCHFSPRDWQRLINNNWGFRPKRLNFKLFNIQVKEVTQNDGTTTIANNLTSTVQVFTDSEYQLPYVLGSAHQGCLPPFPADVFMVPQYGYLTLNNGSQAVGRSSFYCLEYFPSQMLRTGNNFTFSYTFEDVPFHSSYAHSQSLDRLMNPLIDQYLYYLNRTQSNSGTLQQSRLLFSQAGPTSMSLQAKNWLPGPCYRQQRPSKQANDNNNSNFPWTAATKYHLNGRDSLVNPGPAMASHKDDEEKFFPMHGTLIFGKQGTNANDADLEHVMITDEEEIRTTNPVATEQYGNVSNNLQNSNTGPTTENVNHQGALPGMVWQDRDVYLQGPIWAKIPHTDGHFHPSPLMGGFGLKHPPPQIMIKNTPVPANPPTNFSAAKFASFITQYSTGQVSVEIEWELQKENSKRWNPEIQYTSNYNKSVNVDFTVDTNGVYSEPRPIGTRYLTRNL

SEQ ID NO: 4211 - protein, 735 aa, synthetic construct
  REGION 1..735: note = source = /note="Description of Artificial Sequence: Synthetic polypeptide"
MAADGYLPDWLEDTLSEGIRQWWKLKPGPPPPKPAERHQDDSRGLVLPGYKYLGPFNGLDKGEPVNEADAAALEHDKAYDRQLDSGDNPYLKYNHADAEFQERLKEDTSFGGNLGRAVFQAKKRVLEPLGLVEEPVKTAPGKKRPVEHSPAEPDSSSGTGKAGQQPARKRLNFSQTGDADSVPDPQPLGQPPAAPTSLGSTTMATGSGAPMADNNEGADGVGNSSGNWHCDSQWLGDRVITTSTRTWALPTYNNHLYKQISSQSGASNDNHYFGYSTPWGYFDFNRFHCHFSPRDWQRLINNNWGFRPKRLNFKLFNIQVKEVTQNDGTTTIANNLTSTVQVFTDSEYQLPYVLGSAHQGCLPPFPADVFMVPQYGYLTLNNGSQAVGRSSFYCLEYFPSQMLRTGNNFTFSYTFEDVPFHSSYAHSQSLDRLMNPLIDQYLYYLNRTQSNSGTLQQSRLLFSQAGPTSMSLQAKNWLPGPCYRQQRLSKQANDNNNSNFPWTAATKYHLNGRDSLVNPGPAMASHKDDEEKFFPMHGTLIFGKQGTNANDADLEHVMITDEEEIRTTNPVATEQYGNVSNNLQNSNTGPTTENVNHQGALPGMVWQDRDVYLQGPIWAKIPHTDGHFHPSPLMGGFGLKHPPPQIMIKNTPVPANPPTNFSAAKFASFITQYSTGQVSVEIEWELQKENSKRWNPEIQYTSNYNKSVNVDFTVDTNGVYSEPRPIGTRYLTRNL

SEQ ID NO: 4212 - protein, 735 aa, synthetic construct
  REGION 1..735: note = source = /note="Description of Artificial Sequence: Synthetic polypeptide"
MAADGYLPDWLEDTLSEGIRQWWKLKPGPPPPKPAERHQDDSRGLVLPGYKYLGPFNGLDKGEPVNEADAAALEHDKAYDRQLDSGDNPYLKYNHADAEFQERLKEDTSFGGNLGRAVFQAKKRVLEPLGLVEEPVKTAPGKKRPVEHSPAEPDSSSGTGKAGQQPARKRLNFGQTGDADSVPDPQPLGQPPAAPTSLGSTTMATGSGAPMADNNEGADGVGNSSGNWHCDSQWLGDRVITTSTRTWALPTYNNHLYKQISSQSGASNDNHYFGYSTPWGYFDFNRFHCHFSPRDWQRLINNNWGFRPKRLNFKLFNIQVKEVTQNDGTTTIANNLTSTVQVFTDSEYQLPYVLGSAHQGCLPPFPADVFMVPQYGYLTLNNGSQAVGRSSFYCLEYFPSQMLRTGNNFTFSYTFEDVPFHSSYAHSQSLDRLMNPLIDQYLYYLNRTQSNSGTLQQSRLLFSQAGPTSMSLQAKNWLPGPCYRQQRLSKQANDNNNSNFPWTAATKYHLNGRDSLVNPGPAMASHKDDEEKFFPMHGTLIFGKQGTNANDADLEHVMITDEEEIRTTNPVATEQYGNVSNNLQNSNTGPTTENVNHQGALPGMVWQDRDVYLQGPIWAKIPHTDGHFHPSPLMGGFGLKHPPPQIMIKNTPVPANPPTNFSAAKFASFITQYSTGQVSVEIEWEPQKENSKRWNPEIQYTSNYNKSVNVDFTVDTNGVYSEPRPIGTRYLTRNL

SEQ ID NO: 4213 - protein, 735 aa, synthetic construct
  REGION 1..735: note = source = /note="Description of Artificial Sequence: Synthetic polypeptide"
MAADGYLPDWLEDTLSEGIRQWWKLKPGPPPPKPAERHQDDSRGLVLPGYKYLGPFNGLDKGEPVNEADAAALEHDKAYDRQLDSGDNPYLKYNHADAEFQERLKEDTSFGGNLGRAVFQAKKRVLEPLGLVEEPVKTAPGKKRPVEHSPAEPDSSSGTGKAGQQPARKRLNFGQTGDADSVPDPQPLGQPPAAPTSLGSTTMATGSGAPMADNNEGADGVGNSSGNWHCDSQWLGDRVITTSTRTWALPTYNNHLYKQISSQSGASNDNHYFGYSTPWGYFDFNRFHCHFSPRDWQRLINNNWGFRPKRPNFKLFNIQVKEVTQNDGTTTIANNLTSTVQVFTDSEYQLPYVLGSAHQGCLPPFPADVFMVPQYGYLTLNNGSQAVGRSSFYCLEYFPSQMLRTGNNFTFSYTFEDVPFHSSYAHSQSLDRLMNPLIDQYLYYLNRTQSNSGTLQQSRLLFSQAGPTSMSLQAKNWLPGPCYRQQRLSKQANDNNNSNFPWTAATKYHLNGRDSLVNPGPAMASHKDDEEKFFPMHGTLIFGKQGTNANDADLEHVMITDEEEIRTTNPVATEQYGNVSNNLQNSNTGPTTENVNHQGALPGMVWQDRDVYLQGPIWAKIPHTDGHFHPSPLMGGFGLKHPPPQIMIKNTPVPANPPTNFSAAKFASFITQYSTGQVSVEIEWELQKENSKRWNPEIQYTSNYNKSVNVDFTVDTNGVYSEPRPIGTRYLTRNL

SEQ ID NO: 4214 - protein, 735 aa, synthetic construct
  REGION 1..735: note = source = /note="Description of Artificial Sequence: Synthetic polypeptide"
MAADGYLPDWLEDTLSEGIRQWWKLKPGPPPPKPAERHQDDSRGLVLPGYKYLGPFNGLDKGEPVNEADAAALEHDKAYDRQLDSGDNPYLKYNHADAEFQERLKEDTSFGGNLGRAVFQAKKRVLEPLGLVEEPVKTAPGKKRPVEHSPAEPDSSSGTGKAGQQPARKRLNFGQTGDADSVPDPQPLGQPPAAPTSLGSTTMATGSGAPMADNNEGADGVGNSSGNWHCDSQWLGDRVITTSTRTWALPTYNNHLYKQISSQSGASNDNHYFGYSTPWGYFDFNRFHCHFSPRDWQRLINNNWGFRPKRLNFKLFNIQVKEVTQNDGTTTIANNLTSTVQVFTDSEYQLPYVLGSAHQGCLPPFPADVFMVPQYGYLTLNNGSQAVGRSSFYCLEYFPSQMLRTGNNFTFSYTFEDVPFHSSYAHSQSLDRLMNPLIDQYLYYLNRTQSNSGTLQQSRLLFSQAGPTSMSLQAKNWLPGPCYRQQRLSKQANDNNNSNFPWTAATKYHLNGRDSLVNPGPAMASHKDDEEKFFPMHGTLIFGKQGTNANDADLEHVVITDEEEIRTTNPVATEQYGNVSNNLQNSNTGPTTENVNHQGALPGMVWQDRDVYLQGPIWAKIPHTDGHFHPSPLMGGFGLKHPPPQIMIKNTPVPANPPTNFSAAKFASFITQYSTGQVSVEIEWELQKENSKRWNPEIQYTSNYNKSVNVDFTVDTNGVYSEPRPIGTRYLTRNL

SEQ ID NO: 4215 - protein, 735 aa, synthetic construct
  REGION 1..735: note = source = /note="Description of Artificial Sequence: Synthetic polypeptide"
MAADGYLPDWLEDTLSEGIRQWWKLKPGPPPPKPAERHQDDSRGLVLPGYKYLGPFNGLDKGEPVNEADAAALEHDKAYDRQLDSGDNPYLKYNHADAEFQERLKEDTSFGGNLGRAVFQAKKRVLEPLGLVEEPVKTAPGKKRPVEHSPAEPDSSSGTGKAGQQPARKRLNFGQTGDADSVPDPQPLGQPPAAPTSLGSTTMATGSGAPMADNNEGADGVGNSSGNWHCDSQWLGDRVITTSTRTWALPTYNNHLYKQISSQSGASNDNHYFGYSTPWGYFDFNRFHCHFSPRDWQRLINNNWGFRPKRLNFKLFNIQVKEVTQNDGTTTIANNLTSTVQVFTDSEYQLPYVLGSAHQGCLPPFPADVFMVPQYGYLTLNNGSQAVGRSSFYCLEYFPSQMLRTGNNFTFSYTFEDVPFHSSYAHSQSLDRLMNPLIDQYLYYLNRTQSNSGTLQQSRLLFSQAGPTSMSLQAKNWLPGPCYRQQRLSKQANDNNNSNFPWTAATKYHLNGRDSLVNPGPAMASHKDDEEKFFPMHGTLIFGKQGTNANDADLEHVMITDEEEIRTTNPVATEQYGNVSNNLQNSNTGPTTENVNHQGALPGMVWRDRDVYLQGPIWAKIPHTDGHFHPSPLMGGFGLKHPPPQIMIKNTPVPANPPTNFSAAKFASFITQYSTGQVSVEIEWELQKENSKRWNPEIQYTSNYNKSVNVDFTVDTNGVYSEPRPIGTRYLTRNL

SEQ ID NO: 4216 - protein, 735 aa, synthetic construct
  REGION 1..735: note = source = /note="Description of Artificial Sequence: Synthetic polypeptide"
MAADGYLPDWLEDTLSEGIRQWWKLKPGPPPPKPAERHQDDSRGLVLPGYKYLGPFNGLDKGEPVNEADAAALEHDKAYDRQLDSGDNPYLKYNHADAEFQERLKEDTSFGGNLGRAVFQAKKRVLEPLGLVEEPVKTAPGKKRPVEHSPAEPDSSSGTGKAGQQPARKRLNFGQTGGADSVPDPQPLGQPPAAPTSLGSTTMATGSGAPMADNNEGADGVGNSSGNWHCDSQWLGDRVITTSTRTWALPTYNNHLYKQISSQSGASNDNHYFGYSTPWGYFDFNRFHCHFSPRDWQRLINNNWGFRPKRLNFKLFNIQVKEVTQNDGTTTIANNLTSTVQVFTDSEYQLPYVLGSAHQGCLPPFPADVFMVPQYGYLTLNNGSQAVGRSSFYCLEYFPSQMLRTGNNFTFSYTFEDVPFHSSYAHSQSLDRLMNPLIDQYLYYLNRTQSNSGTLQQSRLLFSQAGPTSMSLQAKNWLPGPCYRQQRLSKQANDNNNSNFPWTAATKYHLNGRDSLVNPGPAMASHKDDEEKFFPMHGTLIFGKQGTNANDADLEHVMITDEEEIRTTNPVATEQYGNVSNNLQNSNTGPTTENVNHQGALPGMVWQDRDVYLQGPIWAKIPHTDGHFHPSPLMGGFGLKHPPPQIMIKNTPVPANPPTNFSAAKFASFITQYSTGQVSVEIEWELQKENSKRWNPEIQYTSNYNKSVNVDFTVDTNGVYSEPRPIGTRYLTRNL

SEQ ID NO: 4217 - protein, 735 aa, synthetic construct
  REGION 1..735: note = source = /note="Description of Artificial Sequence: Synthetic polypeptide"
MAADGYLPDWLEDTLSEGIRQWWKLKPGPPPPKPAERHQDDSRGLVLPGYKYLGPFNGLDKGEPVNEADAAALEHDKAYDRQLDSGDNPYLKYNHADAEFQERLKEDTSFGGNLGRAVFQAKKRVLEPLGLVEEPVKTAPGKKRPVEHSPAEPDSSSGTGKAGQQPARKRLNFGQTGDADSVPDPQPLGQPPAAPTSLGSTTMATGSGAPMADNNEGTDGVGNSSGNWHCDSQWLGDRVITTSTRTWALPTYNNHLYKQISSQSGASNDNHYFGYSTPWGYFDFNRFHCHFSPRDWQRLINNNWGFRPKRLNFKLFNIQVKEVTQNDGTTTIANNLTSTVQVFTDSEYQLPYVLGSAHQGCLPPFPADVFMVPQYGYLTLNNGSQAVGRSSFYCLEYFPSQMLRTGNNFTFSYTFEDVPFHSSYAHSQSLDRLMNPLIDQYLYYLNRTQSNSGTLQQSRLLFSQAGPTSMSLQAKNWLPGPCYRQQRLSKQANDNNNSNFPWTAATKYHLNGRDSLVNPGPAMASHKDDEEKFFPMHGTLIFGKQGTNANDADLEHVMITDEEEIRTTNPVATEQYGNVSNNLQNSNTGPTTENVNHQGALPGMVWQDRDVYLQGPIWAKIPHTDGHFHPSPLMGGFGLKHPPPQIMIKNTPVPANPPTNFSAAKFASFITQYSTGQVSVEIEWELQKENSKRWNPEIQYTSNYNKSVNVDFTVDTNGVYSEPRPIGTRYLTRNL

SEQ ID NO: 4218 - protein, 735 aa, synthetic construct
  REGION 1..735: note = source = /note="Description of Artificial Sequence: Synthetic polypeptide"
MAADGYLPDWLEDTLSEGIRQWWKLKPGPPPPKPAERHQDDSRGLVLPGYKYLGPFNGLDKGEPVNEADAAALEHDKAYDRQLDSGDNPYPKYNHADAEFQERLKEDTSFGGNLGRAVFQAKKRVLEPLGLVEEPVKTAPGKKRPVEHSPAEPDSSSGTGKAGQQPARKRLNFGQTGDADSVPDPQPLGQPPAAPTSLGSTTMATGSGAPMADNNEGADGVGNSSGNWHCDSQWLGDRVITTSTRTWALPTYNNHLYKQISSQSGASNDNHYFGYSTPWGYFDFNRFHCHFSPRDWQRLINNNWGFRPKRLNFKLFNIQVKEVTQNDGTTTIANNLTSTVQVFTDSEYQLPYVLGSAHQGCLPPFPADVFMVPQYGYLTLNNGSQAVGRSSFYCLEYFPSQMLRTGNNFTFSYTFEDVPFHSSYAHSQSLDRLMNPLIDQYLYYLNRTQSNSGTLQQSRLLFSQAGPTSMSLQAKNWLPGPCYRQQRLSKQANDNNNSNFPWTAATKYHLNGRDSLVNPGPAMASHKDDEEKFFPMHGTLIFGKQGTNANDADLEHVMITDEEEIRTTNPVATEQYGNVSNNLQNSNTGPTTENVNHQGALPGMVWQDRDVYLQGPIWAKIPHTDGHFHPSPLMGGFGLKHPPPQIMIKNTPVPANPPTNFSAAKFASFITQYSTGQVSVEIEWELQKENSKRWNPEIQYTSNYNKSVNVDFTVDTNGVYSEPRPIGTRYLTRNL

SEQ ID NO: 4219 - protein, 735 aa, synthetic construct
  REGION 1..735: note = source = /note="Description of Artificial Sequence: Synthetic polypeptide"
MAADGYLPDWLEDTLSEGIRQWWKLKPGPPPPKPAERHQDDSRGLVLPGYKYLGPFNGLDKGEPVNEADAAALEHDKAYDRQLDSGDNPYLKYNHADAEFQERLKEDTSFGGNLGRAVFQAKKRVLEPLGLVEEPVKTAPGKKRPVEHSPAEPDSSSGTGKAGQQPARKRLNFGQTGDADSVPDPQPLGQPPAAPTSLGSTTMATGSGAPMADNNEGADGVGNSSGNWHCDSQWLGDRVITTSTRTWALPTYNNHLYKQISSQSGASNDNHYFGYSTPWGYFDFNRFHCHFSPRDWQRLINNNWGFRPKRLNFKLFNIQVKEVTQNDGTTTIANNLTSTVQVFTDSEYQLPYVLGSAHQGCLPPFPADVFMVPQYGYLTLNNGSQAVGRSSFYCLEYFPSQMLRTGNNFTFSYTFEDVPFHSSYAHSQSLDRLMNPLIDQYLYYLNRTQSNSGTLQQSRLLFSQAGPTSMSLQAKNWLPGPCYRQQRLSKQANDNNNSNFPWTAATKYHLNGRDSLVNPGPAMASHKDDEEKFFPMHGTLIFGKQGTNANDADLEHVMITDEEEIRATNPVATEQYGNVSNNLQNSNTGPTTENVNHQGALPGMVWQDRDVYLQGPIWAKIPHTDGHFHPSPLMGGFGLKHPPPQIMIKNTPVPANPPTNFSAAKFASFITQYSTGQVSVEIEWELQKENSKRWNPEIQYTSNYNKSVNVDFTVDTNGVYSEPRPIGTRYLTRNL

SEQ ID NO: 4220 - protein, 735 aa, synthetic construct
  REGION 1..735: note = source = /note="Description of Artificial Sequence: Synthetic polypeptide"
MAADGYLPDWLEDTLSEGIRQWWKLKPGPPPPKPAERHQDDSRGLVLPGYKYLGPFNGLDKGEPVNEADAAALEHDKAYDRQLDSGDNPYLKYNHADAEFQERLKEDTSFGGNLGRAVFQAKKRVLEPLGLVEEPVKTAPGKKRPVEHSPAEPDSSSGTGKAGQQPARKRLNFGQTGDADSVPDPQPLGQPPAAPTSLGSTTMATGSGAPMADNNEGADGVGNSSGNWHCDSQWLGDRVITTSTRTWALPTYNNHLYKQISSQSGASNDNHYFGYSTPWGYFDFNRFHCRFSPRDWQRLINNNWGFRPKRLNFKLFNIQVKEVTQNDGTTTIANNLTSTVQVFTDSEYQLPYVLGSAHQGCLPPFPADVFMVPQYGYLTLNNGSQAVGRSSFYCLEYFPSQMLRTGNNFTFSYTFEDVPFHSSYAHSQSLDRLMNPLIDQYLYYLNRTQSNSGTLQQSRLLFSQAGPTSMSLQAKNWLPGPCYRQQRLSKQANDNNNSNFPWTAATKYHLNGRDSLVNPGPAMASHKDDEEKFFPMHGTLIFGKQGTNANDADLEHVMITDEEEIRTTNPVATEQYGNVSNNLQNSNTGPTTENVNHQGALPGMVWQDRDVYLQGPIWAKIPHTDGHFHPSPLMGGFGLKHPPPQIMIKNTPVPANPPTNFSAAKFASFITQYSTGQVSVEIEWELQKENSKRWNPEIQYTSNYNKSVNVDFTVDTNGVYSEPRPIGTRYLTRNL

SEQ ID NO: 4221 - protein, 735 aa, synthetic construct
  REGION 1..735: note = source = /note="Description of Artificial Sequence: Synthetic polypeptide"
MAADGYLPDWLEDTLSEGIRQWWKLKPGPPPPKPAERHQDDSRGLVLPGYKYLGPFNGLDKGEPVNEADAAALEHDKAYDRQLDSGDNPYLKYNHADAEFQERLKEDTSFGGNLGRAVFQAKKRVLEPLGLVEEPVKTAPGKKRPVEHSPAEPDSSSGTGKAGQQPARKRLNFGQTGDADSVPDPQPLGQPPAAPTSLGSTTMATGSGAPMADNNEGADGVGNSSGNWHCDSQWLGDRVITTSTRTWALPTYNNHLYKQISSQSGASNDNHYFGYSTPWGYFDFNRFHCHFSPRDWQRLINNNWGFRPKRLNFKLFNIQVKEVTQNDGTTTIANNLTSTVQVFTDSEYQLPYVLGSAHQGCLPPFPADVFMVPQYGYLTLNNGSQAVGRSSFYCLEYFPSQMLRTGNNFTFSYTFEDVPFRSSYAHSQSLDRLMNPLIDQYLYYLNRTQSNSGTLQQSRLLFSQAGPTSMSLQAKNWLPGPCYRQQRLSKQANDNNNSNFPWTAATKYHLNGRDSLVNPGPAMASHKDDEEKFFPMHGTLIFGKQGTNANDADLEHVMITDEEEIRTTNPVATEQYGNVSNNLQNSNTGPTTENVNHQGALPGMVWQDRDVYLQGPIWAKIPHTDGHFHPSPLMGGFGLKHPPPQIMIKNTPVPANPPTNFSAAKFASFITQYSTGQVSVEIEWELQKENSKRWNPEIQYTSNYNKSVNVDFTVDTNGVYSEPRPIGTRYLTRNL

SEQ ID NO: 4222 - protein, 735 aa, synthetic construct
  REGION 1..735: note = source = /note="Description of Artificial Sequence: Synthetic polypeptide"
MAADGYLPDWLEDTLSEGIRQWWKLKPGPPPPKPAERHQDDSRGLVLPGYKYLGPFNGLDKGEPVNEADAAALEHDKAYDRQLDSGDNPYLKYNHADAEFQERLKEDTSFGGNLGRAVFQAKKRVLEPLGLVEEPVKTAPGKKRPVEHSPAEPDSSSGTGKAGQQPARKRLNFGQTGDADSVPDPQPLGQPPAAPTSLGSTTMATGSGAPMADNNEGADGVGNSSGNWHCDSQWLGDRVITTSTRTWALPTYSNHLYKQISSQSGASNDNHYFGYSTPWGYFDFNRFHCHFSPRDWQRLINNNWGFRPKRLNFKLFNIQVKEVTQNDGTTTIANNLTSTVQVFTDSEYQLPYVLGSAHQGCLPPFPADVFMVPQYGYLTLNNGSQAVGRSSFYCLEYFPSQMLRTGNNFTFSYTFEDVPFHSSYAHSQSLDRLMNPLIDQYLYYLNRTQSNSGTLQQSRLLFSQAGPTSMSLQAKNWLPGPCYRQQRLSKQANDNNNSNFPWTAATKYHLNGRDSLVNPGPAMASHKDDEEKFFPMHGTLIFGKQGTNANDADLEHVMITDEEEIRTTNPVATEQYGNVSNNLQNSNTGPTTENVNHQGALPGMVWQDRDVYLQGPIWAKIPHTDGHFHPSPLMGGFGLKHPPPQIMIKNTPVPANPPTNFSAAKFASFITQYSTGQVSVEIEWELQKENSKRWNPEIQYTSNYNKSVNVDFTVDTNGVYSEPRPIGTRYLTRNL

SEQ ID NO: 4223 - protein, 735 aa, synthetic construct
  REGION 1..735: note = source = /note="Description of Artificial Sequence: Synthetic polypeptide"
MAADGYLPDWLEDTLSEGIRQWWKLKPGPPPPKPAERHQDDSRGLVLPGYKYLGPFNGLDKGEPVNEADAAALEHDKAYDRQLDSGDNPYLKYNHADAEFQERLKEDTSFGGNLGRAVFQAKKRVLEPLGLVEEPVKTAPGKKRPVEHSPAEPDSSSGTGKAGQQPARKRLNFGQTGDADSVPDPQPLGQPPAAPTSLGSTTMATGSGAPMADNNEGADGVGNSSGNWHCDSQWLGDRVITTSTRTWALPTYNNHLYKQISSQSGASNDNHYFGYSTPWGYFDFNRFHCHFSPRDWQRLINNNWGFRPKRLNFKPFNIQVKEVTQNDGTTTIANNLTSTVQVFTDSEYQLPYVLGSAHQGCLPPFPADVFMVPQYGYLTLNNGSQAVGRSSFYCLEYFPSQMLRTGNNFTFSYTFEDVPFHSSYAHSQSLDRLMNPLIDQYLYYLNRTQSNSGTLQQSRLLFSQAGPTSMSLQAKNWLPGPCYRQQRLSKQANDNNNSNFPWTAATKYHLNGRDSLVNPGPAMASHKDDEEKFFPMHGTLIFGKQGTNANDADLEHVMITDEEEIRTTNPVATEQYGNVSNNLQNSNTGPTTENVNHQGALPGMVWQDRDVYLQGPIWAKIPHTDGHFHPSPLMGGFGLKHPPPQIMIKNTPVPANPPTNFSAAKFASFITQYSTGQVSVEIEWELQKENSKRWNPEIQYTSNYNKSVNVDFTVDTNGVYSEPRPIGTRYLTRNL

SEQ ID NO: 4224 - protein, 735 aa, synthetic construct
  REGION 1..735: note = source = /note="Description of Artificial Sequence: Synthetic polypeptide"
MAADGYLPDWLEDTLSEGIRQWWKLKPGPPPPKPAERHQDDSRGLVLPGYKYLGPFNGLDKGEPVNEADAAALEHDKAYDRQLDSGDNPYLKYNHADAEFQERLKEDTSFGGNLGRAVFQAKKRVLEPLGLVEEPVKTAPGKKRPVEHSPAEPDSSSGTGKAGQQPARKRLNFGQTGDADSVPDPQPLGQPPAAPTSLGSTTMATGSGAPMADNNEGADGVGNSSGNWHCDSQWLGDRVITTSTRTWALPTYNNHLYKQISSQSGASNGNHYFGYSTPWGYFDFNRFHCHFSPRDWQRLINNNWGFRPKRLNFKLFNIQVKEVTQNDGTTTIANNLTSTVQVFTDSEYQLPYVLGSAHQGCLPPFPADVFMVPQYGYLTLNNGSQAVGRSSFYCLEYFPSQMLRTGNNFTFSYTFEDVPFHSSYAHSQSLDRLMNPLIDQYLYYLNRTQSNSGTLQQSRLLFSQAGPTSMSLQAKNWLPGPCYRQQRLSKQANDNNNSNFPWTAATKYHLNGRDSLVNPGPAMASHKDDEEKFFPMHGTLIFGKQGTNANDADLEHVMITDEEEIRTTNPVATEQYGNVSNNLQNSNTGPTTENVNHQGALPGMVWQDRDVYLQGPIWAKIPHTDGHFHPSPLMGGFGLKHPPPQIMIKNTPVPANPPTNFSAAKFASFITQYSTGQVSVEIEWELQKENSKRWNPEIQYTSNYNKSVNVDFTVDTNGVYSEPRPIGTRYLTRNL

SEQ ID NO: 4225 - protein, 735 aa, synthetic construct
  REGION 1..735: note = source = /note="Description of Artificial Sequence: Synthetic polypeptide"
MAADGYLPDWLEDTLSEGIRQWWKLKPGPPPPKPAERHQDDSRGLVLPGYKYLGPFNGLDKGEPVNEADAAALEHDKAYDRQLDSGDNPYLKYNHADAEFQERLKEDTSFGGNLGRAVFQAKKRVLEPLGLVEEPVKTAPGKKRPVEHSPAEPDSSSGTGKAGQQPARKRLNFGQTGDADSVPDPQPLGQPPAAPTSLGSTTMATGSGAPMADNNEGADGVGNSSGNWHCDSQWLGDRVITTSTRTWALPTYNNHLYKQISSQSGASNDNHYFGYSTPWGYFDFNRFHCHFSPRDWQRLINNNWGFRPKRLNFKLFNIQVKEVTQNDGTTTIANNLTSTVQVFTDSEYQLPYVLGSAHQGCLPPFPADVFMVPQYGYLTLNNGSQAVGRSSFYCLEYFPSQMLRTGNNFTFSYTFEDVPFHSSYAHSQSLDRLMNPLIDQYLYYLNRTQSNSGTLQQSRLLFSQAGPTSMSLQAKNWLPGPCYRQQRLSKQANDNNNSNFPWTAATKYHLNGRDSLVNPGPAMASHKDDEEKFFPMHGTLIFGKQGTNANDADLEHVMITDEEEIRTANPVATEQYGNVSNNLQNSNTGPTTENVNHQGALPGMVWQDRDVYLQGPIWAKIPHTDGHFHPSPLMGGFGLKHPPPQIMIKNTPVPANPPTNFSAAKFASFITQYSTGQVSVEIEWELQKENSKRWNPEIQYTSNYNKSVNVDFTVDTNGVYSEPRPIGTRYLTRNL

SEQ ID NO: 4226 - protein, 735 aa, synthetic construct
  REGION 1..735: note = source = /note="Description of Artificial Sequence: Synthetic polypeptide"
MAADGYLPDWLEDTLSEGIRQWWKLKPGPPPPKPAERHQDDSRGLVLPGYKYLGPFNGLDKGEPVNEADAAALEHDKAYDRQLDSGDNPYLKYNHADAEFQERLKEDTSFGGNLGRAVFQAKKRVLEPLGLVEEPVKTAPGKKRPVEHSPAEPDSSSGTGKAGQQPARKRLNFGQTGDADSVPDPQPLGQPPAAPTSLGSTTMATGSGAPMADNNEGADGVGNSSGNWHCDSQWLGDRVITTSTRTWALPTYNNHLYKQISSQSGASNDNHYFGYSTPWGYFDFNRFHCHFSPRDWQRLINNNWGFRPKRLNFKLFNIQVKEVTQNDGTTTIANNLTSTVQVFTDSEYQLPYVLGSAHQGCLPPFPADVFMVPQYGYLTLNNGSQAVGRSSFYCLEYFPSQMLRTGNNFTFSYTFEGVPFHSSYAHSQSLDRLMNPLIDQYLYYLNRTQSNSGTLQQSRLLFSQAGPTSMSLQAKNWLPGPCYRQQRLSKQANDNNNSNFPWTAATKYHLNGRDSLVNPGPAMASHKDDEEKFFPMHGTLIFGKQGTNANDADLEHVMITDEEEIRTTNPVATEQYGNVSNNLQNSNTGPTTENVNHQGALPGMVWQDRDVYLQGPIWAKIPHTDGHFHPSPLMGGFGLKHPPPQIMIKNTPVPANPPTNFSAAKFASFITQYSTGQVSVEIEWELQKENSKRWNPEIQYTSNYNKSVNVDFTVDTNGVYSEPRPIGTRYLTRNL

SEQ ID NO: 4227 - protein, 735 aa, synthetic construct
  REGION 1..735: note = source = /note="Description of Artificial Sequence: Synthetic polypeptide"
MAADGYLPDWLEDTLSEGIRQWWKLKPGPPPPKPAERHQDDSRGLVLPGYKYLGPFNGLDKGEPVNEADAAALEHDKAYDRQLDSGDNPYLKYNHADAEFQERLKEDTSFGGNLGRAVFQAKKRVLEPLGLVEEPVKTAPGKKRPVEHSPAEPDSSSGTGKAGQQPARKRLNFGQTGDADSVPDPQPLGQPPAAPTSLGSTTMATGSGAPMADNNEGADGVGNSSGNWHCDSQWLGDRVITTSTRTWALPTYNNHLYKQISSQSGASNDNHYFGYSTPWGYFDFNRFHCHFSPRDWQRLINNNWGFRPKRLNFKLFNIQVKEVTQNDGTTTIANNLTSTVQVFTDSEYQLPYVLGSAHQGCLPPFPADVFMVPQYGYLTLNNGSQAVGRSSFYCLEYFPSQMLRTGNNFTFSYTFEDVPFHSSYAHSQSLDRLMNPLIDQYLYYLNRTQSNSGTLQQSRLLFSQAGPTSMSLQAKNWLPGPCYRQQRLSKQANDNNNSNFPWTAATKYHLNGRDSLVNPGPAMASHKDDEEKFFPMHGTLIFGKQGTNANDADLEHVMITDEEEIRTTNPVATEQYGNVSNNLQNSNTGPTTENVNHQGALPGMVWQDRDVYLQGPIWAKIPHTDGHFHPSPLMGGFGLKHPPPQIMIKNTPVPANPPTNFSAAKFASFITQYSTGQVSVEIEWELQKENSKRWNPEIQYTSNYSKSVNVDFTVDTNGVYSEPRPIGTRYLTRNL

SEQ ID NO: 4228 - protein, 735 aa, synthetic construct
  REGION 1..735: note = source = /note="Description of Artificial Sequence: Synthetic polypeptide"
MAADGYLPDWLEDTLSEGIRQWWRLKPGPPPPKPAERHQDDSRGLVLPGYKYLGPFNGLDKGEPVNEADAAALEHDKAYDRQLDSGDNPYLKYNHADAEFQERLKEDTSFGGNLGRAVFQAKKRVLEPLGLVEEPVKTAPGKKRPVEHSPAEPDSSSGTGKAGQQPARKRLNFGQTGDADSVPDPQPLGQPPAAPTSLGSTTMATGSGAPMADNNEGADGVGNSSGNWHCDSQWLGDRVITTSTRTWALPTYNNHLYKQISSQSGASNDNHYFGYSTPWGYFDFNRFHCHFSPRDWQRLINNNWGFRPKRLNFKLFNIQVKEVTQNDGTTTIANNLTSTVQVFTDSEYQLPYVLGSAHQGCLPPFPADVFMVPQYGYLTLNNGSQAVGRSSFYCLEYFPSQMLRTGNNFTFSYTFEDVPFHSSYAHSQSLDRLMNPLIDQYLYYLNRTQSNSGTLQQSRLLFSQAGPTSMSLQAKNWLPGPCYRQQRLSKQANDNNNSNFPWTAATKYHLNGRDSLVNPGPAMASHKDDEEKFFPMHGTLIFGKQGTNANDADLEHVMITDEEEIRTTNPVATEQYGNVSNNLQNSNTGPTTENVNHQGALPGMVWQDRDVYLQGPIWAKIPHTDGHFHPSPLMGGFGLKHPPPQIMIKNTPVPANPPTNFSAAKFASFITQYSTGQVSVEIEWELQKENSKRWNPEIQYTSNYNKSVNVDFTVDTNGVYSEPRPIGTRYLTRNL

SEQ ID NO: 4229 - protein, 735 aa, synthetic construct
  REGION 1..735: note = source = /note="Description of Artificial Sequence: Synthetic polypeptide"
MAADGYLPDWLEDTLSEGIRQWWKLKPGPPPPKPAERHKDDSRGLVLPGYKYLGPFNGLDKGEPVNEADAAALEHDKAYDRQLDSGDNPYLKYNHADAEFQERLKEDTSFGGNLGRAVFQAKKRVLEPLGLVEEPVKTAPGKKRPVEHSPVEPDSSSGTGKAGQQPARKRLNFGQTGDADSVPDPQPLGQPPAAPTSLGSTTMATGSGAPMADNNEGADGVGNSSGNWHCDSQWLGDRVITTSTRTWALPTYNNHLYKQISSQSGASNDNHYFGHSTPWGYFDFNRFHCHFSPRDWQRLINNNWGFRPKRLNFKLFNIQVKEVTQNDGTTTIANNLTSTVQVFTDSEYQLPYVLGSAHQGCLPPFPADVFMVPQYGYLTLNNGSQAVGRSSFYCLEYFPSQMLRTGNNFTFSYTFEDVPFHSSYAHSQSLDRLMNPLIDQYLYYLNKTQSNSGTLQQSRLLFSQAGPTSMSLQAKNWLPGPCYRQQRLSKQANDNNNSNFPWTAATKYHLNGRDSLVNPGPAMASHKDDEEKFFPMHGTLIFGKQGTNANDADLDNVMITDEEEIRTTNPVATEQYGTVSNNLQNSNTGPTTGTVNHQGALPGMVWQDRDVYLQGPIWAKIPHTDGHFHPSPLMGGFGLKHPPPQIMIKNTPVPANPPTNFSSAKSASFITQYSTGQVSVEIEWELQKENSKRWNPEIQYTSNYNKSVNVDFTVDTNGVYSEPRPIGTRYLTRNL

SEQ ID NO: 4230 - protein, 735 aa, synthetic construct
  REGION 1..735: note = source = /note="Description of Artificial Sequence: Synthetic polypeptide"
MAADGYLPDWLEDTLSEGIRQWWKLKPGPPPPKPAERHKDDSRGLVLPGYKYLGPFNGLDKGEPVNEADAAALEHDKAYDRQLDSGDNPYLKYNHADAEFQERLKEDTSFGGNLGRAVFQAKKRVLEPLGLVEEPVKTAPGKKRPVEHSPVEPDSSSGTGKAGQQPARKRLNFGQTGDADSVPDPQPLGQPPAAPSGLGTNTMATGSGAPMADNNEGADGVGNSSGNWHCDSTWMGDRVITTSTRTWALPTYNNHLYKQISSQSGASNDNHYFGYSTPWGYFDFNRFHCHFSPRDWQRLINNNWGFRPKRLNFKLFNIQVKEVTQNDGTTTIANNLTSTVQVFTDSEYQLPYVLGSAHQGCLPPFPADVFMVPQYGYLTLNNGSQAVGRSSFYCLEYFPSQMLRTGNNFTFSYTFEDVPFHSSYAHSQSLDRLMNPLIDQYLYYLNKTQSNSGTLQQSRLLFSQAGPTSMSLQAKNWLPGPCYRQQRLSKQANDNNNSNFPWTAATKYHLNGRDSLVNPGPAMASHKDDEEKFFPMHGTLIFGKQGTNANDADLDNVMITDEEEIRTTNPVATEQYGTVSNNLQNSNTGPTTGTVNHQGALPGMVWQDRDVYLQGPIWAKIPHTDGHFHPSPLMGGFGLKHPPPQIMIKNTPVPANPPTNFSSAKFASFITQYSTGQVSVEIEWELQKENSKRWNPEIQYTSNYNKSVNVDFTVDTNGVYSEPRPIGTRYLTRNL

SEQ ID NO: 4231 - protein, 735 aa, synthetic construct
  REGION 1..735: note = source = /note="Description of Artificial Sequence: Synthetic polypeptide"
MAADGYLPDWLEDTLPEGIRQWWKLKPGPPPPKPAERHKDDSRGLVLPGYKYLGPFNGLDKGEPVNEADAAALEHDKAYDRQLDSGDNPYLKYNHADAEFQERLKEDTSFGGNLGRAVFQAKKRVLEPLGLVEEPVKTAPGKKRPVEHSPVEPDSSSGTGKAGQQPARKRLNFGQTGDADSVPDPQPLGQPPAAPTSLGSTTMATGSGAPMADNNEGADGVGNSSGNWHCDSQWLGDRVITTSTRTWALPTYNNHLYKQISSQSGASNDNHYFGHSTPWGYFDFNRFHCHFSPRDWQRLINNNWGFRPKRLNFKLFNIQVKEVTQNDGTTTIANNLTSTVQVFTDSEYQLPYVLGSAHQGCLPPFPADVFMVPQYGYLTLNNGSQAVGRSSFYCLEYFPSQMLRTGNNFTFSYTFEDVPFHSSYAHSQSLDRLMNPLIDQYLYYLNKTQSNSGTLQQSRLLFSQAGPTSMSLQAKNWLPGPCYRQQRLSKQANDNNNSNFPWTAATKYHLNGRDSLVNPGPAMASHKDDEEKFFPMHGTLIFGKQGTNANDADLDNVMITDEEEIRTTNPVATEQYGTVSNNLQNSNTGPTTGTVNHQGALPGMVWQDRDVYLQGPIWAKIPHTDGHFHPSPLMGGFGLKHPPPQIMIKNTPVPANPPTNFSSAKFASFITQYSTGQVSVEIEWELQKENSKRWNPEIQYTSNYNKSVNVDFTVDTNGVYSEPRPIGTRYLTRNL

SEQ ID NO: 4232 - protein, 735 aa, synthetic construct
  REGION 1..735: note = source = /note="Description of Artificial Sequence: Synthetic polypeptide"
MAADGYLPDWLEDTLSEGIRQWWKLKPGPPPPKPAERHKDDSRGLVLPGYKYLGPFNGLDKGEPVNEADAAALEHDKAYDRQLDSGDNPYLKYNHADAEFQERLKEDTSFGGNLGRAVFQAKKRVLEPLGLVEEPVKTAPGKKRPVEHSPVEPDSSSGTGKAGQQPARKRLNFGQTGDADSVPDPQPLGQTPAAPTSLGSTTMATGSGAPMADNNEGADGVGNSSGNWHCDSQWLGDRVITTSTRTWALPTYNNHLYKQISSQSGASNDNHYFGYSTPWGYFDFNRFHCHFSPRDWQRLINNNWGFRPKRLNFKLFNIQVKEVTQNDGTTTIANNLTSTVQVFTDSEYQLPYVLGSAHQGCLPPFPADVFMVPQYGYLTLNNGSQAVGRSSFYCLEYFPSQMLRTGNNFTFSYTFEDVPFHSSYAHSQSLDRLMNPLIDQYLYYLNKTQSNSGTLQQSRLLFSQAGPTSMSLQAKNWLPGPCYRQQRLSKQANDNNNSNFPWTAATKYHLNGRDSLVNPGPAMASHKDDEEKFFPMHGTLIFGKQGTNANDADLDNVMITDEEEIRTTNPVATEQYGTVSNNLQNSNTGPTTGTVNHQGALPGMVWQDRDVYLQGPIWAKIPHTDGHFHPSPLMGGFGLKHPPPQIMIKNTPVPANPPTNFSSAKFASFITQYSTGQVGVEIEWELQKENSKRWNPEIQYTSNYNKSVNVDFTVDTNGVYSEPRPIGTRYLTRNL

SEQ ID NO: 4233 - protein, 735 aa, synthetic construct
  REGION 1..735: note = source = /note="Description of Artificial Sequence: Synthetic polypeptide"
MAADGYLPDWLEDTLSEGIRQWWKLKPGPPPPKPAERHKDDSRGLVLPGYKYLGPFNGLDKGEPVNEADAAALEHDKAYDRQLDSGDNPYLKYNHADAEFQERLKEDTSFGGNLGRAVFQAKKRVLEPLGLVEEPVKTAPGKKRPVEHSPVEPDSSSGTGKAGQQPARKRLNFGQTGDADSVPDPQPLGQTPAAPTSLGSTTMATGSGAPMADNNEGADGVGNSSGNWHCDSQWLGDRVITTSTRTWALPTYNNHLYKQISSQSGASNDNHYFGYSTPWGYFDFNRFHCHFSPRDWQRLINNNWGFRPKRLNFKLFNIQVKEVTQNDGTTTIANNLTSTVQVFTDSEYQLPYVLGSAHQGCLPPFPADVFMVPQYGYLTLNNGSQAVGRSSFYCLEYFPSQMLRTGNNFTFSYTFEDVPFHSSYAHSQSLDRLMNPLIDQYLYYLNKTQSNSGTLQQSRLLFSQAGPTSMSLQAKNWLPGPCYRQQRLSKQANDNNNSNFPWTAATKYHLNGRDSLVNPGPAMASHKDDEEKFFPMHGTLIFGKQGTNANDADLDNVMITDEEEIRTTNPVATEQYGTVSNNLQNSNTGPTTGTVNHQGALPGMVWQDRDVYLQGPIWAKIPHTDGHFHPSPLMGGFGLKHPPPQIMIKNTPVPANPPTNFSSAKFASFITQYSTGQVSVEIEWELQKENSKRWNPEIQYTSNYNKSVNVDFTVDTNGVYSEPRPIGTRYLTRNL

SEQ ID NO: 4234 - protein, 735 aa, synthetic construct
  REGION 1..735: note = source = /note="Description of Artificial Sequence: Synthetic polypeptide"
MAADGYLPDWLEDTLSEGIRQWWKLKPGPPPPKPAERHKDDSRGLVLPGYKYLGPFNGLDKGEPVNEADAAALEHDKAYDRQLDSGDNPYLKYNHADAEFQERLKEDTSFGGNLGRAVFQAKKRVLEPLGLVEEPVKTAPGKKRPVEHSPVEPDSSSGTGKAGQQPARKRLNFGQTGDADSVPDPQPLGQPPAAPTSLGSTTMATGSGAPMADNNEGADGVGNSSGNRHCDSQWLGDRVITTSTRTWALPTYNNHLYKQISSQSGASNDNHYFGHSTPWGYFDFNRFHCHFSPRDWQRLINNNWGFRPKRLNFKLFNIQVKEVTQNDGTTTIANNLTSTVQVFTDSEYQLPYVLGSAHQGCLPPFPADVFMVPQYGYLTLNNGSQAVGRSSFYCLEYFPSQMLRTGNNFTFSYTFEDVPFHSSYAHSQSLDRLMNPLIDQYLYYLNKTQSNSGTLQQSRLLFSQAGPTSMSLQAKNWLPGPCYRQQRLSKQANDNNNSNFPWTAATKYHLNGRDSLVNPGPAMASHKDDEEKFFPMHGTLIFGKQGTNANDADLDNVMITDEEEIRTTNPVATEQYGTVSNNLQNSNTGPTTGTVNHQGALPGMVWQDRDVYLQGPIWAKIPHTDGHFHPSPLMGGFGLKHPPPQIMIKNTPVPANPPTNFSSAKFASFITQYSTGQVSVEIEWELQKENSKRWNPEIQYTSNYNKSVNVDFTVDTNGVYSEPRPIGTRYLTRNL

SEQ ID NO: 4235 - protein, 735 aa, synthetic construct
  REGION 1..735: note = source = /note="Description of Artificial Sequence: Synthetic polypeptide"
MAADGYLPDWLEDTLSEGIRQWWKLKPGPPPPKPAERHKDDSRGLVLPGYKYLGPFNGLDKGEPVNEADAAALEHDKAYDRQLDSGDNPYLKYNHADAEFQERLKEDTSFGGNLGRAVFQAKKRVLEPLGLVEEPVKTAPGKKRPVEHSPVEPDSSSGTGKAGQQPARKRLNFGQTGDADSVPDPQPLGQPPAAPTSLGSTTMATGSGAPMADNNEGADGVGNSSGNWHCDSQWLGDRVITTSTRTWALPTYNNHLYKQISSQSGASNDNHYFGYSTPWGYFDFNRFHCHFSPRDWQRLINNNWGFRPKRLNFKLFNIQVKEVTQNDGTTTIANNLTSTVQVFTDSEYQLPYVLGSAHQGCLPPFPADVFMVPQYGYLTLNNGSQAVGRSSFYCLEYFPSQMPRTGNNFTFSYTFEDVPFHSSYAHSQSLDRLMNPLIDQYLYYLNKTQSNSGTLQQSRLLFSQAGPTSMSLQAKNWLPGPCYRQQRLSKQANDNNNSNFPWTAATKYHLNGRDSLVNPGPAMASHKDDEEKFFPMHGTLIFGKQGTNANDADLDNVMITDEEEIRTTNPVATEQYGTVSNNLQNSNTGPTTGTVNHQGALPGMVWQDRDVYLQGPIWAKIPHTDGHFHPSPLMGGFGLKHPPPQIMIKNTPVPANPPTNFSSAKFASFITQYSTGQVSVEIEWELQKENSKRWNPEIQYTSNYNKSVNVDFTVDTNGVYSEPRPIGTRYLTRNL

SEQ ID NO: 4236 - protein, 735 aa, synthetic construct
  REGION 1..735: note = source = /note="Description of Artificial Sequence: Synthetic polypeptide"
MAADGYLPDWLEDTLSEGIRQWWKLKPGPPPPKPAERHKDDSRGLVLPGYKYLGPFNGLDKGEPVNEADAAALEHDKAYDRQLDSGDNPYLKYNHADAEFQERLKEDTSFGGNLGRAVFQAKKRVLEPLGLVEEPVKTAPGKKRPVEHSPVEPDSSSGTGKAGQQPARKRLNFGQTGDADSVPDPQPLGQPPAAPTSLGSTTMATGSGAPMADNNEGADGVGNSSGNWHCDSQWLGDRVITTSTRTWALPTYNNHLYKQISSQSGASNDNHYFGYSTPWGYFDFNRFHCHFSPRDWQRLINNNWGFRPKRLNFKLFNIQVKEVTQNDGTTTIANNLTSTVQVFTDSEYQLPYVLGSAHQGCLPPFPADVFMVPQYGYLTLNNGSQAVGRSSFYCLEYFPSQMLRTGNNFTFSYTFEDVPFHSSYAHSQSLDRLMNPLIDQYLYYLNKTQSNSGTLQQSRLLFSQAGPTSMSLQAKNWLPGPCYRQQRLSKQANDNNNSNFPWTAATKYHLNGRDSLVNPGPAMASHKDDEEKFFPMHGTLIFGKQGTNANDADLDNVMITDEEEIRTTNPVATEQYGTVSNNLQNSNTGPTTGTVNHQGALPGMVWQDRDVYLQGPIWAKIPHTDGHFHPSPLMGGFGLKHPPPQIMIKNTPVPANPPTNFSSAKSASFITQYSTGQVSVEIEWELQKENSKRWNPEIQYTSNYNKSVNVDFTVDTNGVYSEPRPIGTRYLTRNL

SEQ ID NO: 4237 - protein, 735 aa, synthetic construct
  REGION 1..735: note = source = /note="Description of Artificial Sequence: Synthetic polypeptide"
MAADGYLPDWLEDTLSEGIRQWWKLKPGPPPPKPAERHKDDSRGLVLPGYKYLGPFNGLDKGEPVNEADAAALEHDKAYDRQLDSGDNPYLKYNHADAEFQERLKEDTSFGGNLGRAVFQAKKRVLEPLGLVEEPVKTAPGKKRPVEHSPVEPDSSSGTGKAGQQPARKRLNFGQTGDADSVPDPQPLGQPPAAPTSLGSTTMATGSGAPMADNNEGADGVGNSSGNWHCDSQWLGDRVITTSTRTWALPTYNNHLYKQISSQSGASNDNHYFGHSTPWGYFDFNRFHCHFSPRDWQRLINNNWGFRPKRLNFKLFNIQVKEVTQNDGTTTIANNLTSTVQVFTDSEYQLPYVLGSAHQGCLPPFPADVFMVPQYGYLTLNNGSQAVGRSSFYCLEYFPSQMLRTGNNFTFSYTFEDAPFHSSYAHSQSLDRLMNPLIDQYLYYLNKTNNQSGTFTQSRLLFSQAGPTSILFKSKNWLPGPCYRQQRLSKTANDNNNSNFPWTAATKYHLNGRDSLVNPGPAMASHKDDEEKFFPQHGTLIFGKQGTKLTDADLDNVMITDEEEIRTTNPVATEQYGTVSNNLQKLNILATTGTVNTQGALPGMVWQDRDVYLQGPIWAKIPHTDGHFHPSPLMGGFGLKHPPPQIMIKNTPVPANPPTNFSSAKFASFITQYSTGQVSVEIEWELQKENSKRWNPEIQYTSNYNKSVNVDFTVDTNGVYSEPRPIGTRYLTRNL

SEQ ID NO: 4238 - protein, 735 aa, synthetic construct
  REGION 1..735: note = source = /note="Description of Artificial Sequence: Synthetic polypeptide"
MAADGYLPDWLEDTLSEGIRQWWKLKPGPPPPKPAERHKDASRGLVLPGYKYLGPFNGLDKGEPVNEADAAALEHDKAYDRQLDSGDNPYLKYNHADAEFQERLKEDTSFGGNLGRAVFQAKKRVLEPLGLVEEPVKTAPGKKRPVEHSPVEPDSSSGTGKAGQQPARKRLNFGQTGDADSVPDPQPLGQPPAAPTSLGSTTMATGSGAPMADNNEGADGVGNSSGNWHCDSQWLGDRVITTSTRTWALPTYNNHLYKQISSQSGASNDNHYFGYSTPWGYFDFNRFHCHFSPRDWQRLINNNWGFRPKRLNFKLFNIQVKEVTQNDGTTTIANNLTSTVQVFTDSEYQLPYVLGSAHQGCLPPFPADVFMVPQYGYLTLNNGSQAVGRSSFYCLEYFPSQMLRTGNNFTFSYTFEDVPFHSSYAHSQSLDRLMNPLIDQYLYYLNKTNNQSGTFTQSRLLFSQAGPTSILFKSKNWLPGPCYRQQRLSKTANDNNNSNFPWTAATKYHLNGRDSLVNPGPAMASHKDDEEKFFPMHGTLIFGKQGTKLTDADLDNVMITDEEEIRTTNPVATEQYGTVSNNLQKLNILATTGTVNTQGALPGMVWQDRDVYLQGPIWAKIPHTDGHFHPSPLMGGFGLKHPPPQIMIKNTPVPANPPTNFSSAKFASFITQYSTGQVSVEIEWELQKENSKRWNPEIQYTSNYNKSVNVDFTVDTNGVYSEPRPIGTRYLTRNL

SEQ ID NO: 4239 - protein, 735 aa, synthetic construct
  REGION 1..735: note = source = /note="Description of Artificial Sequence: Synthetic polypeptide"
MAADGYLPDWLEDTLSEGIRQWWKLKPGPPPPKPAERHKDDSRGLVLPGYKYLGPFNGLDKGEPVNEADAAALEHDKAYDRQLDSGDNPYLKYNHADAEFQERLKEDTSFGGNLGRAVFQAKKRVLEPLGLVEEPVKTAPGKKRPVEHSPVEPDSSSGTGKAGQQPARKRLNFGQTGDADSVPDPQPLGQPPAAPSGLGTNTMATGSGAPMADNNEGADGVGNSSGNWHCDSTWMGDRVITTSTRTWALPTYNNHLYKQISSQSGASNDNHYFGYSTPWGYFDFNRFHCHFSPRDWQRLINNNWGFRPKRLNFKLFNIQVKEVTQNDGTTTIANNLTSTVQVFTDSEYQLPYVLGSAHQGCLPPFPADVFMVPQYGYLTLNNGSQAVGRSSFYCLEYFPSQMLRTGNNFTFSYTFEDVPFHSSYAHSQSLDRLMNPLIDQYLYYLNKTNNQSGTFTQSRLLFSQAGPTSILFKSKNWLPGPCYRQQRLSKTANDNNNSNFPWTAATKYHLNGRDSLVNPGPAMASHKDDEEKFFPQHGTLIFGKQGTKLTDADLDNVMITDEEEIRTTNPVATEQYGTVSNNLQKLNILATTGTVNTQGALPGMVWQDRDVYLQGPIWAKIPHTDGHFHPSPLMGGFGLKHPPPQIMIKNTPVPANPPTNFSSAKFASFITQYSTGQVSVEIEWELQKENSKRWNPEIQYTSNYNKSVNVDFTVDTNGVYSEPRPIGTRYLTRNL

SEQ ID NO: 4240 - protein, 735 aa, synthetic construct
  REGION 1..735: note = source = /note="Description of Artificial Sequence: Synthetic polypeptide"
MAADGYLPDWLEDTLSEGIRQWWKLKPGPPPPKPAERHKDDSRGLVLPGYKYLGPFNGLDKGEPVNEADAAALEHDKAYDRQLDSGDNPYLKYNHADAEFQERLKEDTSFGGNLGRAVFQAKKRVLEPLGLVEEPVKTAPGKKRPVEHSPVEPDSSSGTGKAGQQPARKRLNFGQTGDADSVPDPQPLGQPPAAPTSLGSTTMATGSGAPMADNNEGADGVGNSSGNWHCDSQWLGDRVITTSTRTWALPTYNNHLYKQISSQSGASNDNHYFGHSTPWGYFDFNRFHCHFSPRDWQRLINNNWGFRPKRLNFKLFNIQVKEVTQNDGTTTIANNLTSTVQVFTDSEYQLPYVLGSAHQGCLPPFPADVFMVPQYGYLTLNNGSQAVGRSSFYCLEYFPSQMLRTGNNFTFSYTFEDVPFHSSYAHSQSLDRLMNPLIDQYLYYLNKTNNQSGTFTQSRLLFSQAGPTSILFKSKNWLPGPCYRQQRLSKTANDNNNSNFPWTAATKYHLNGRDSLVNPGPAMASHKDDEEKFFPMHGTLIFGKQGTKLTDADLDNVMITDEEEIRTTNPVATEQYGTVSNNLQKLNILATTGTVNTQGALPGMVWQDRDVYLQGPIWAKIPHTDGHFHPSPLMGGFGLKHPPPQIMIKNTPVPANPPTNFSSAKFASFITQYSTGQVSVEIEWELQKENSKRWNPEIQYTSNYNKSVNVDFTVDTNGVYSEPRPIGTRYLTRNL

SEQ ID NO: 4241 - protein, 735 aa, synthetic construct
  REGION 1..735: note = source = /note="Description of Artificial Sequence: Synthetic polypeptide"
MAADGYLPDWLEDTLSEGIRQWWKLKPGPPPPKPAERHKDDSRGLVLPGYKYLGPFNGLDKGEPVNEADAAALEHDKAYDRQLDSGDNPYLKYNHADAEFQERLKEDTSFGGNLGRAVFQAKKRVLEPLGLVEEPVKTAPGKKRPVEHSPVEPDSSSGTGKAGQQPARKRLNFGQTGDADSVPDPQPLGQPPAAPTSLGSTTMATGSGAPMADNNEGADGVGNSSGNWHCDSQWLGDRVITTSTRTWALPTYNNHLYKQISSQSGASNDNHYFGYSTPWGYFDFNRFHCHFSPRDWQRLINNNWGFRPKRLNFKLFNIQVKEVTQNDGTTTIANNLTSTVQVFTDSEYQLPYVLGSAHQGCLPPFPADVFMVPQYGYLTLNNGSQAVGRSSFYCLEYFPSQMLRTGNNFTFSYTFEDVPFHSSYAHSQSLDRLMNPLIDQYLYYLNKTNNQSGTFTQSRLLFSQAGPTSILFKSKNWLPGPCYRQQRLSKTANDNNNSNFPWTAATKYHLNGRDSLVNPGPAMASHKDDEEKFFPQHGTLIFGKQGTKLTDADLDNVMITDEEEIRTTNPVATEQYGTVSNNLQKLNILATTGTVNTQGALPGMVWQDRDVYLQGPIWAKIPHTDGHFHPSPLMGGFGLKHPPPQIMIKNTPVPANPPTNFSSAKFASFITQYSTGQVSVEIEWELQKENSKRWNPEIQYTSNYNKSVNVDFTVDTNGVYSEPRPIGTRYLTRNL

SEQ ID NO: 4242 - protein, 735 aa, synthetic construct
  REGION 1..735: note = source = /note="Description of Artificial Sequence: Synthetic polypeptide"
MAADGYLPDWLEDTLSEGIRQWWKLKPGPPPPKPAERHKDASRGLVLPGYKYLGPFNGLDKGEPVNEADAAALEHDKAYDRQLDSGDNPYLKYNHADAEFQERLKEDTPFGGNLGRAVFQAKKRVLEPLGLVEEPVKTAPGKKRPVEHSPVEPDSSSGTGKAGQRPARKRLNFGQTGDADSVPDPQPLGQPPAAPTSLGSTTMATGSGAPMADNNEGADGVGNSSGNWHCDSQWLGDRVITTSTRTWALPTYNNHLYKQIPSQSGASNDNHYFGYSTPWGYFDFNRFHCHFSPRDWQRLINNNWGFRPKRLNFKLFNIQVKEVTQNDGTTTIANNLTSTVQVFTDSEYQLPYVLGSAHQGCLPPFPADVFMVPQYGYLTLNNGSQAVGRSSFYCLEYFPSQMLRTGNNFTFSYTFEDVPFHSSYAHSQSLDRLMNPLIDQYLYYLNKTNNQSGTFTQSRLLFSQAGPTSILFKSKNWLPGPCYRQQRLSKTANDNNNSNFPWTAATKYHLNGRDSLVNPGPAMASHKDDEEKFFPQHGTLIFGKQGTKLTDADLDNVMITDEEEIRTTNPVATEQYGTVSNNLQKLNILATTGTVNTQGALPGMVWQDRDVYLQGPIWAKIPHTDGHFHPSPLMGGFGLKHPPPQIMIKNTPVPANPPTNFSSAKFASFITQYSTGQVSVEIEWELQKENSKRWNPEIQYTSNYNKSVNVDFTVDTNGVYSEPRPIGTRYLTRNL

SEQ ID NO: 4243 - protein, 735 aa, synthetic construct
  REGION 1..735: note = source = /note="Description of Artificial Sequence: Synthetic polypeptide"
MAADGYLPDWLEDTLSEGIRQWWKLKPGPPPPKPAERHKDDSRGLVLPGYKYLGPFNGLDKGEPVNEADAAALEHDKAYDRQLDSGDNPYLKYNHADAEFQERLKEDTSFGGNLGRAVFQAKKRVLEPLGLVEEPVKTAPGKKRPVEHSPVEPDSSSGTGKAGQQPARKRLNFGQTGDADSVPDPQPLGQPPAAPSGLGTNTMATGSGAPMADNNEGADGVGNSSGNWHCDSTWMGDRVITTSTRTWALPTYNNHLYKQISSQSGASNDNHYFGYSTPWGYFDFNRFHCHFSPRDWQRLINNNWGFRPKRLNFKLFNIQVKEVTQNDGTTTIANNLTSTVQVFTDSEYQLPYVLGSAHQGCLPPFPADVFMVPQYGYLTLNNGSQAVGRSSFYCLEYFPSQMLRTGNNFTFSYTFEDAPFHSSYAHSQSLDRLMNPLIDQYLYYLNKTNNQSGTFTQSRLLFSQAGPTSILFKSKNWLPGPCYRQQRLSKTANDNNNSNFPWTAATKYHLNGRDSLVNPGPAMASHKDDEEKFFPQHGTLIFGKQGTKLTDADLDNVMITDEEEIRTTNPVATEQYGTVSNNLQKLNILATTGTVNTQGALPGMVWQDRDVYLQGPIWAKIPHTDGHFHPSPLMGGFGLKHPPPQIMIKNTPVPANPPTNFSSAKFASFITQYSTGQVSVEIEWELQKENSKRWNPEIQYTSNYNKSVNVDFTVDTNGVYSEPRPIGTRYLTRNL

SEQ ID NO: 4244 - protein, 735 aa, synthetic construct
  REGION 1..735: note = source = /note="Description of Artificial Sequence: Synthetic polypeptide"
MAADGYLPDWLEDILSEGIRQWWKLKPGPPPPKPAERHKDASRGLVLPGYKYLGPFNGLDKGEPVNEADAAALEHDKAYDRQLDSGDNPYLKYNHADAEFQERLKEDTSFGGNLGRAVFQAKKRVLEPLGLVEEPVKTAPGKKRPVEHSPVEPDSSSGTGKAGQQPARKRLNFGQTGDADSVPDPQPLGQPPAAPTSLGSTTMATGSGAPMADNNEGADGVGNSSGNWHCDSQWLGDRVITTSTRTWALPTYNNHLYKQISSQSGASNDNHYFGYSTPWGYFDFNRFHCHFSPRDWQRLINNNWGFRPKRLNFKLFNIQVKEVTQNDGTTTIANNLTSTVQVFTDSEYQLPYVLGSAHQGCLPPFPADVFMVPQYGYLTLNNGSQAVGRSSFYCLEYFPSQMLRTGNNFTFSYTFEDVPFHSSYAHSQSLDRLMNPLIDQYLYYLNKTNNQSGTFTQSRLLFSQAGPTSILFKSKNWLPGPCYRQQRLSKTANDNNNSNFPWTAATKYHLNGRDSLVNPGPAMASHKDDEEKFFPQHGTLIFGKQGTKLTDADLDNVMITDEEEIRTTNPVATEQYGTVSNNLQKLNILATTGTVNTQGALPGMVWQDRDVYLQGPIWAKIPHTDGHFHPSPLMGGFGLKHPPPQIMIKNTPVPANPPTNFSSAKFASFITQYSTGQVSVEIEWELQKENSKRWNPEIQYTSNYNKSVNVDFTVDTNGVYSEPRPIGTRYLTRNL

SEQ ID NO: 4245 - protein, 735 aa, synthetic construct
  REGION 1..735: note = source = /note="Description of Artificial Sequence: Synthetic polypeptide"
MAADGYLPDWLEDILSEGIRQWWKLKPGPPPPKPAERHKDASRGLVLPGYKYLGPFNGLDKGEPVNEADAAALEHDKAYDRQLDSGDNPYLKYNHADAEFQERLKEDTSFGGNLGRAVFQAKKRVLEPLGLVEEPVKTAPGKKRPVEHSPVEPDSSSGTGKAGQQPARKRLNFGQTGDADSVPDPQPLGQPPAAPTSLGSTTMATGSGAPMADNNEGADGVGNSSGNWHCDSQWLGDRVIATSTRTWALPTYNNHLYKQISSQSGASNDNHYFGYSTPWGYFDFNRFHCHFSPRDWQRLINNNWGFRPKRLNFKLFNIQVKEVTQNDGTTTIANNLTSTVQVFTDSEYQLPYVLGSAHQGCLPPFPADVFMVPQYGYLTLNNGSQAVGRSSFYCLEYFPSQMLRTGNNFTFSYTFEDVPFHSSYAHSQSLDRLMNPLIDQYLYYLNKTNNQSGTFTQSRLLLSQAGPTSILFKSKNWLPGPCYRQQRLSKTANDNNNSNFPWTAATKYHLNGRDSLVNPGPAMASHKDDEEKFFPQHGTLIFGKQGTKLTDADLDNVMITDEEEIRTTNPVATEQYGTVSNNLQKLNILATTGTVNTQGALPGMVWQDRDVYLQGPIWAKIPHTDGHFHPSPLMGGFGLKHPPPQIMIKNTPVPANPPTNFSSAKFASFITQYSTGQVSVEIEWELQKENSKRWNPEIQYTSNYNKSVNVDFTVDTNGVYSEPRPIGTRYLTRNL

SEQ ID NO: 4246 - protein, 735 aa, synthetic construct
  REGION 1..735: note = source = /note="Description of Artificial Sequence: Synthetic polypeptide"
MAADGYLPDWLEDTLSEGIRQWWKLKPGPPPPKPAERHKDASRGLVLPGYKYLGPFNGLDKGEPVNEADAAALEHDKAYDRQLDSGDNPYLKYNHADAEFQERLKEDTPFGGNLGRAVFQAKKRVLEPLGLVEEPVKTAPGKKRPVEHSPVEPDSSSGTGKAGQQPARKRLNFGQTGDADSVPDPQPLGQPPAAPTSLGSTTMATGSGAPMADNNEGADGVGNSSGNWHCDSQWLGDRVITTSTRTWALPTYNNHLYKQIPSQSGASNDNHYFGYSTPWGYFDFNRFHCHFSPRDWQRLINNNWGFRPKRLNFKLFNIQVKEVTQNDGTTTIANNLTSTVQVFTDSEYQLPYVLGSAHQGCLPPFPADVFMVPQYGYLTLNNGSQAVGRSSFYCLEYFPSQMLRTGNNFTFSYTFEDVPFHSSYAHSQSLDRLMNPLIDQYLYYLNKTNNQSGTFTQSRLLFSQAGPTSILFKSKNWLPGPCYRQQRLSKTANDNNNSNFPWTAATKYHLNGRDSLVNPGPAMASHKDDEEKFFPQHGTLIFGKQGTKLTDADLDNVMITDEEEIRTTNPVATEQYGTVSNNLQKLNILATTGTVNTQGALPGMVWQDRDVYLQGPIWAKIPHTDGHFHPSPLMGGFGLKHPPPQIMIKNTPVPANPPTNFSSAKFASFITQYSTGQVSVEIEWELQKENSKRWNPEIQYTSNYNKSVNVDFTVDTNGVYSEPRPIGTRYLTRNL

SEQ ID NO: 4247 - protein, 735 aa, synthetic construct
  VARIANT 172: note = Any naturally occurring amino acid
  VARIANT 220: note = Any naturally occurring amino acid
  VARIANT 367: note = Any naturally occurring amino acid
  VARIANT 499: note = Any naturally occurring amino acid
  VARIANT 558: note = Any naturally occurring amino acid
  VARIANT 590: note = Any naturally occurring amino acid
  VARIANT 597: note = Any naturally occurring amino acid
  REGION 1..735: note = source = /note="Description of Artificial Sequence: Synthetic polypeptide"
MAADGYLPDWLEDTLSEGIRQWWKLKPGPPPPKPAERHKDDSRGLVLPGYKYLGPFNGLDKGEPVNEADAAALEHDKAYDRQLDSGDNPYLKYNHADAEFQERLKEDTSFGGNLGRAVFQAKKRVLEPLGLVEEPVKTAPGKKRPVEHSPVEPDSSSGTGKAGQQPARKRLXFGQTGDADSVPDPQPLGQPPAAPSGLGTNTMATGSGAPMADNNEGADXVGNSSGNWHCDSTWMGDRVITTSTRTWALPTYNNHLYKQISSQSGASNDNHYFGYSTPWGYFDFNRFHCHFSPRDWQRLINNNWGFRPKRLNFKLFNIQVKEVTQNDGTTTIANNLTSTVQVFTDSEYQLPYVLGSAHQGCLPPFPXDVFMVPQYGYLTLNNGSQAVGRSSFYCLEYFPSQMLRTGNNFTFSYTFEDVPFHSSYAHSQSLDRLMNPLIDQYLYYLNKTNNQSGTFTQSRLLFSQAGPTSILFKSKNWLPGPCYRQQRLSKTANDNNNSXFPWTAATKYHLNGRDSLVNPGPAMASHKDDEEKFFPMHGTLIFGKQGTKLTDADLDNVXITDEEEIRTTNPVATEQYGTVSNNLQKLNILXTTGTVNXQGALPGMVWQDRDVYLQGPIWAKIPHTDGHFHPSPLMGGFGLKHPPPQIMIKNTPVPANPPTNFSYAKFASFITQYSTGQVSVEMEWELQKENSKRWNPEIPYTSKYNKSVNVDFTVDTNGVYSEPRPIGTRYLTRNL

SEQ ID NO: 4248 - protein, 735 aa, synthetic construct
  REGION 1..735: note = source = /note="Description of Artificial Sequence: Synthetic polypeptide"
MAADGYLPDWLEDTLSEGIRQWWKLKPGPPPPKPAERHQDDSRGLVLPGYKYLGPFNGLDKGEPVNEADAAALEHDKAYDRQLDSGDNPYLKYNHADAEFQERLKEDTSFGGNLGRAVFQAKKRVLEPLGLVEEPVKTAPGKKRPVEHSPAEPDSSSGTGKAGQQPARKRLNFGQTGDADSVPDPQPLGQPPAAPTSLGSTTMATGSGAPMADNNEGADGVGNSSGNWHCDSQWLGDRVITTSTRTWALPTYNNHLYKQISSQSGASNDNHYFGYSTPWGYFDFNRFHCHFSPRDWQRLINNNWGFRPKRLNFKLFNIQVKEVTQNDGTTTIANNLTSTVQVFTDSEYQLPYVLGSAHQGCLPPFPADVFMVPQYGYLTLNNGSQAVGRSSFYCLEYFPSQMLRTGNNFTFSYTFEDVPFHSSYAHSQSLDRLMNPLIDQYLYYLNRTQSNSGTLQQSRLLFSQAGPTSMSLQAKNWLPGPCYRQQRLSKQANDNNNSNFPWTAATKYHLNGRDSLVNPGPAMASHKDDEEKFFPMHGTLIFGKQGTNANDADLEHVMITDEEEIRTTNPVATEQYGNVSNNLQNSNTGPTTENVNHQGALPGMVWQDRDVYLQGPIWAKIPHTDGHFHPSPLMGGFGLKHPPPQIMIKNTPVPANPPTNFSAAKFASFITQYSTGQASVEIEWELQKENSKRWNPEIQYTSNYNKSVNVDFTVDTNGVYSEPRPIGTRYLTRNL

SEQ ID NO: 4249 - protein, 735 aa, synthetic construct
  REGION 1..735: note = source = /note="Description of Artificial Sequence: Synthetic polypeptide"
MAADGYLPDWLEDTLSEGIRQWWKLKPGPPPPKPAERHKDDSRGLVLPGYKYLGPFNGLDKGEPVNEADAAALEHDKAYDRQLDSGDNPYLKYNHADAEFQERLKEDTSFGGNLGRAVFQAKKRVLEPLGLVEEPVKTAPGKKRPVEHSPVEPDSSSGTGKAGQQPARKRLNFGQTGDADSVPDPQPLGQPPAAPTSLGSTTMATGSGAPMADNNEGADGVGNSSGNWHCDSQWLGDRVITTSTRTWALPTYNNHLYKQISSQSGASNDNHYFGHSTPWGYFDFNRFHCHFSPRDWQRLINNNWGFRPKRLNFKLFNIQVKEVTQNDGTTTIANNLTSTVQVFTDSEYQLPYVLGSAHQGCLPPFPADVFMVPQYGYLTLNNGSQAVGRSSFYCLEYFPSQMLRTGNNFTFSYTFEDVPFHSSYAHSQSLDRLMNPLIDQYLYYLNKTQSNSGTLQQSRLLFSQAGPTSMPLQAKNWLPGPCYRQQRLSKQANDNNNSNFPWTAATKYHLNGRDSLVNPGPAMASHKDDEEKFFPMHGTLIFGKQGTNANDADLDNVMITDEEEIRTTNPVATEQYGTVSNNLQNSNTGPTTGTVNHQGALPGMVWQDRDVYLQGPIWAKIPHTDGHFHPSPLMGGFGLKHPPPQIMIKNTPVPANPPTNFSSAKFASFITQYSTGQVSVEIEWELQKENSKRWNPEIQYTSNYNKSVNVDFTVDTNGVYSEPRPIGTRYLTRNL

SEQ ID NO: 4250 - protein, 735 aa, synthetic construct
  REGION 1..735: note = source = /note="Description of Artificial Sequence: Synthetic polypeptide"
MAADGYLPDWLEDTLSEGIRQWWKLKPGPPPPKPAERHKDDSRGLVLPGYKYLGPFNGLDKGEPVNEADAAALEHDKAYDRQLDSGDNPYLKYNHADAEFQERLKEDTSFGGNLGRAVFQAKKRVLEPLGLVEEPVKTAPGKKRPVEHSPVEPDSSSGTGKAGQQPARKRLNFGQTGDADSVPDPQPLGQPPAAPTSLGSTTMATGSGAPMADNNEGADGVGNSSGNWHCDSQWLGDRVITTSTRTWALPTYNNHLYKQISSQSGASNDNHYFGHSTPWGYFDFNRFHCHFSPRDWQRLINNNWGFRPKRLNFKLFNIQVKEVTQNDGTTTIANNLTSTVQVFTDSEYQLPYVLGSAHQGCLPPFPADVFMVPQYGYLTLNNGSQAVGRSSFYCLEYFPSQMLRTGNNFTFSYTFEDVPFHSSYAHSQSLDRLMNPLIDQYLYYLNKTQSNSGTLQQSRLLFSQAGPTSMSLQAKNWLPGPCYRQQRLSKQANDNNNSNFPWTAATKYHLNGRDSLVNPGPAMASHKDDEEKFFPMHGTLIFGKQGTNANDADLDNVMITDEEEIRTTNPVATEQYGTVSNNLQNSNTGPTTGTANHQGALPGMVWQDRDVYLQGPIWAKIPHTDGHFHPSPLMGGFGLKHPPPQIMIKNTPVPANPPTNFSSAKFASFITQYSTGQVSVEIEWELQKENSKRWNPEIQYTSNYNKSVNVDFTVDTNGVYSEPRPIGTRYLTRNL

SEQ ID NO: 4251 - protein, 735 aa, synthetic construct
  REGION 1..735: note = source = /note="Description of Artificial Sequence: Synthetic polypeptide"
MAADGYLPDWLEDTLSEGIRQWWKLKPGPPPPKPAERHKDDSRGLVLPGYKYLGPFNGLDKGEPVNEADAAALEHDKAYDRQLDSGDNPYLKYNHADAEFQERLKEDTSFGGNLGRAVFQAKKRVLEPLGLVEEPVKTAPGKKRPVEHSPVEPDSSSGTGKAGQQPARKRLNFGQTGDAGSVPDPQPLGQPPAAPTSLGSTTMATGSGAPMADNNEGADGVGNSSGNWHCDSQWLGDRVITTSTRTWALPTYNNHLYKQISSQSGASNDNHYFGHSTPWGYFDFNRFHCHFSPRDWQRLINNNWGFRPKRLNFKLFNIQVKEVTQNDGTTTIANNLTSTVQVFTDSEYQLPYVLGSAHQGCLPPFPADVFMVPQYGYLTLNNGSQAVGRSSFYCLEYFPSQMLRTGNNFTFSYTFEDVPFHSSYAHSQSLDRLMNPLIDQYLYYLNKTQSNSGTLQQSRLLFSQAGPTSMSLQAKNWLPGPCYRQQRLSKQANDNNNSNFPWTAATKYHLNGRDSLVNPGPAMASHKDDEEKFFPMHGTLIFGKQGTNANDADLDNVMITDEEEIRTTNPVATEQYGTVSNNLQNSNTGPTTGTVNHQGALPGMVWQDRDVYLQGPIWAKIPHTDGHFHPSPLMGGFGLKHPPPQIMIKNTPVPANPPTNFSSAKFASFITQYSTGQVSVEIEWELQKENSKRWNPEIQYTSNYNKSVNVDFTVDTNGVYSEPRPIGTRYLTRNL

SEQ ID NO: 4252 - protein, 735 aa, synthetic construct
  REGION 1..735: note = source = /note="Description of Artificial Sequence: Synthetic polypeptide"
MAADGYLPDWLEDTLSEGIRQWWKLKPGPPPPKPAERHKDDSRGLVLPGYKYLGPFNGLDKGEPVNEADAAALEHDKAYDRQLDSGDNPYLKYNHADAEFQERLKEDTSFGGNLGRAVFQAKKRVLEPLGLVEEPVKTAPGKKRPVEHSPVEPDSSSGTGKAGQQPARKRLNFGQTGDADSVPDPQPLGQPPAAPTSLGSTTMATGSGAPMADNNEGADGVGNSSGNWHCDSQWLDDRVITTSTRTWALPTYNNHLYKQISSQSGASNDNHYFGHSTPWGYFDFNRFHCHFSPRDWQRLINNNWGFRPKRLNFKLFNIQVKEVTQNDGTTTIANNLTSTVQVFTDSEYQLPYVLGSAHQGCLPPFPADVFMVPQYGYLTLNNGSQAVGRSSFYCLEYFPSQMLRTGNNFTFSYTFEDVPFHSSYAHSQSLDRLMNPLIDQYLYYLNKTQSNSGTLQQSRLLFSQAGPTSMSLQAKNWLPGPCYRQQRLSKQANDNNNSNFPWTAATKYHLNGRDSLVNPGPAMASHKDDEEKFFPMHGTLIFGKQGTNANDADLDNVMITDEEEIRTTNPVATEQYGTVSNNLQNSNTGPTTGTVNHQGALPGMVWQDRDVYLQGPIWAKIPHTDGHFHPSPLMGGFGLKHPPPQIMIKNTPVPANPPTNFSSAKFASFITQYSTGQVSVEIEWELQKENSKRWNPEIQYTSNYNKSVNVDFTVDTNGVYSEPRPIGTRYLTRNL

SEQ ID NO: 4253 - protein, 735 aa, synthetic construct
  REGION 1..735: note = source = /note="Description of Artificial Sequence: Synthetic polypeptide"
MAADGYLPDWLEDTLSEGIRQWWKLKPGPPPPKPAERHKDDSRGLVLPGYKYLGPFNGLDKGEPVNEADAAALEHDKAYDRQLDSGDNPYLKYNHADAEFQERLKEDTSFGGNLGRAVFQAKKRVLEPLGLVEEPVKTAPGKKRPVEHSPVEPGSSSGTGKAGQQPARKRLNFGQTGDADSVPDPQPLGQPPAAPTSLGSTTMATGSGAPMADNNEGADGVGNSSGNWHCDSQWLGDRVITTSTRTWALPTYNNHLYKQISSQSGASNDNHYFGHSTPWGYFDFNRFHCHFSPRDWQRLINNNWGFRPKRLNFKLFNIQVKEVTQNDGTTTIANNLTSTVQVFTDSEYQLPYVLGSAHQGCLPPFPADVFMVPQYGYLTLNNGSQAVGRSSFYCLEYFPSQMLRTGNNFTFSYTFEDVPFHSSYAHSQSLDRLMNPLIDQYLYYLNKTQSNSGTLQQSRLLFSQAGPTSMSLQAKNWLPGPCYRQQRLSKQANDNNNSNFPWTAATKYHLNGRDSLVNPGPAMASHKDDEEKFFPMHGTLIFGKQGTNANDADLDNVMITDEEEIRTTNPVATEQYGTVSNNLQNSNTGPTTGTVNHQGALPGMVWQDRDVYLQGPIWAKIPHTDGHFHPSPLMGGFGLKHPPPQIMIKNTPVPANPPTNFSSAKFASFITQYSTGQVSVEIEWELQKENSKRWNPEIQYTSNYNKSVNVDFTVDTNGVYSEPRPIGTRYLTRNL

SEQ ID NO: 4254 - protein, 735 aa, synthetic construct
  REGION 1..735: note = source = /note="Description of Artificial Sequence: Synthetic polypeptide"
MAADGYLPDWLEDTLSEGIRQWWKLKPGPPPPKPAERHKDDSRGLVLPGYKYLGPFNGLDKGEPVNEADAAALEHDKAYDRQLDSGDNPYLKYNHADAEFQERLKEDTSFGGNLGRAVFQAKKRVLEPLGLVEEPVKTAPGKKRPVEHSPVEPDSSSGTGKAGQQPARKRLNFGQTGDADSVPDPQPLGQPPAAPTSLGSTTMATGSGAPMADNNEGADGVGNSSGNWHCDSQWLGDRVITTSTRTWALPTYNNHLYKQISSQSGASNDNHYFGHSTPWGYFDFNRFHCHFSPRDWQRLINNNWGFRPKRLNFKLFNIQVKEVTQNDGTTTIANNLTSTVQVFTDSEYQLPYVLGSAHQGCLPPFPADVFMVPQYGYLTLNNGSQAVGRSSFYCLEYFPSQMLRTGNNFTFSYTFEDVPFHSSYAHSQSLDRLMNPLIDQYLYYLNKTQSNSGTLQQSRLLFSQAGPTSMSLQAKNWLPGPCYRQQRLSKQANDNNNSNFPWTAATKYHLNGRDSLVNPGPAMASHKDDEEKFFPMHGTLIFGKQGTNANDADLDNVMITDEEEIRTTNPVATEQYGTVSNNLQNSNTGPTTGTVNHQGALPGMVWQDRDVYLQGPIWAKIPHTDGHFHPSPLMGGFGLKHPPPQIMIKNTPVPANPPTNFSSAKFASFITQYSTGQVSVEIGWELQKENSKRWNPEIQYTSNYNKSVNVDFTVDTNGVYSEPRPIGTRYLTRNL

SEQ ID NO: 4255 - protein, 735 aa, synthetic construct
  REGION 1..735: note = source = /note="Description of Artificial Sequence: Synthetic polypeptide"
MAADGYLPDWLEDTLSEGIRQWWKLKPGPPPPKPAERHKDDSRGLVLPGYKYLGPFNGLDKGEPVNEADAAALEHDKAYDRQLDSGDNPYLKYNHADAEFQERLKEDTSFGGNLGRAVFQAKKRVLEPLGLVEEPVKTAPGKKRPVEHSPVEPDSSSGTGKAGQQPARKRLNFGQTGDADSVPDPQPLGQPPAAPTSLGSTTMATGSGAPMADNNEGADGVGNSSGNWHCDSQWLGDRVITTSTRTWALPTYNNHLYKQISSQSGASNDNHYFGHSTPWGYFDFNRFHCHFSPRDWQRLINNNWGFRPKRLNFKLFNIQVKEVTQNDGTTTIANNLTSTVQVFTDSEYQLPYVLGSAHQGCLPPFPADVFMVPQYGYLTLNNGSQAVGRSSFYCLEYFPSQMLRTGNNFTFSYTFEDVPFHSSYAHSQSLDRLMNPLIDRYLYYLNKTQSNSGTLQQSRLLFSQAGPTSMSLQAKNWLPGPCYRQQRLSKQANDNNNSNFPWTAATKYHLNGRDSLVNPGPAMASHKDDEEKFFPMHGTLIFGKQGTNANDADLDNVMITDEEEIRTTNPVATEQYGTVSNNLQNSNTGPTTGTVNHQGALPGMVWQDRDVYLQGPIWAKIPHTDGHFHPSPLMGGFGLKHPPPQIMIKNTPVPANPPTNFSSAKFASFITQYSTGQVSVEIEWELQKENSKRWNPEIQYTSNYNKSVNVDFTVDTNGVYSEPRPIGTRYLTRNL

SEQ ID NO: 4256 - protein, 735 aa, synthetic construct
  REGION 1..735: note = source = /note="Description of Artificial Sequence: Synthetic polypeptide"
MAADGYLPDWLEDTLSEGIRQWWKLKPGPPPPKPAERHKDDSRGLVLPGYKYLGPFNGLDKGEPVNEADAAALEHDKAYDRQLDSGDNPYLKYNHADAEFQERLKEDTSFGGNLGRAVFQAKKRVLEPLGLVEEPVKTAPGKKRPVEHSPVEPDSSSGTGKAGQQPARKRLNFGQTGDADSVPDPQPLGQPPAAPTSLGSTTMATGSGAPMADNNEGADGVGNSSGNWHCDSQWLGDRVITTSTRTWALPTYNNHLYKQISSQSGASNDNHYFGHSTPWGYFDFNRFHCHFSPRDWQRLINNNWGFRPKRLNFKLFNIQVKEVTQNDGTTTIANNLTSTVQVFTDSEYQLPYVLGSAHQGCLPPFPADVFMVPQYGYLTLNNGSQAVGRSSFYCLEYFPSQMLRTGNNFTFSYTFEDVPFHSSYAHSQSLDRLMNPLIDQHLYYLNKTQSNSGTLQQSRLLFSQAGPTSMSLQAKNWLPGPCYRQQRLSKQANDNNNSNFPWTAATKYHLNGRDSLVNPGPAMASHKDDEEKFFPMHGTLIFGKQGTNANDADLDNVMITDEEEIRTTNPVATEQYGTVSNNLQNSNTGPTTGTVNHQGALPGMVWQDRDVYLQGPIWAKIPHTDGHFHPSPLMGGFGLKHPPPQIMIKNTPVPANPPTNFSSAKFASFITQYSTGQVSVEIEWELQKENSKRWNPEIQYTSNYNKSVNVDFTVDTNGVYSEPRPIGTRYLTRNL

SEQ ID NO: 4257 - protein, 735 aa, synthetic construct
  REGION 1..735: note = source = /note="Description of Artificial Sequence: Synthetic polypeptide"
MAADGYLPDWLEDTLSEGIRQWWKLKPGPPPPKPAERHKDDSRGPVLPGYKYLGPFNGLDKGEPVNEADAAALEHDKAYDRQLDSGDNPYLKYNHADAEFQERLKEDTSFGGNLGRAVFQAKKRVLEPLGLVEEPVKTAPGKKRPVEHSPVEPDSSSGTGKAGQQPARKRLNFGQTGDADSVPDPQPLGQPPAAPTSLGSTTMATGSGAPMADNNEGADGVGNSSGNWHCDSQWLGDRVITTSTRTWALPTYNNHLYKQISSQSGASNDNHYFGHSTPWGYFDFNRFHCHFSPRDWQRLINNNWGFRPKRLNFKLFNIQVKEVTQNDGTTTIANNLTSTVQVFTDSEYQLPYVLGSAHQGCLPPFPADVFMVPQYGYLTLNNGSQAVGRSSFYCLEYFPSQMLRTGNNFTFSYTFEDVPFHSSYAHSQSLDRLMNPLIDQYLYYLNKTQSNSGTLQQSRLLFSQAGPTSMSLQAKNWLPGPCYRQQRLSKQANDNNNSNFPWTAATKYHLNGRDSLVNPGPAMASHKDDEEKFFPMHGTLIFGKQGTNANDADLDNVMITDEEEIRTTNPVATEQYGTVSNNLQNSNTGPTTGTVNHQGALPGMVWQDRDVYLQGPIWAKIPHTDGHFHPSPLMGGFGLKHPPPQIMIKNTPVPANPPTNFSSAKFASFITQYSTGQVSVEIEWELQKENSKRWNPEIQYTSNYNKSVNVDFTVDTNGVYSEPRPIGTRYLTRNL

SEQ ID NO: 4258 - protein, 735 aa, synthetic construct
  REGION 1..735: note = source = /note="Description of Artificial Sequence: Synthetic polypeptide"
MAADGYLPDWLEDTLSEGIRQWWKLKPGPPPPKPAERHKDDSRGLVLPGYKYLGPFNGLDKGEPVNEAGAAALEHDKAYDRQLDSGDNPYLKYNHADAEFQERLKEDTSFGGNLGRAVFQAKKRVLEPLGLVEEPVKTAPGKKRPVEHSPVEPDSSSGTGKAGQQPARKRLNFGQTGDADSVPDPQPLGQPPAAPTSLGSTTMATGSGAPMADNNEGADGVGNSSGNWHCDSQWLGDRVITTSTRTWALPTYNNHLYKQISSQSGASNDNHYFGHSTPWGYFDFNRFHCHFSPRDWQRLINNNWGFRPKRLNFKLFNIQVKEVTQNDGTTTIANNLTSTVQVFTDSEYQLPYVLGSAHQGCLPPFPADVFMVPQYGYLTLNNGSQAVGRSSFYCLEYFPSQMLRTGNNFTFSYTFEDVPFHSSYAHSQSLDRLMNPLIDQYLYYLNKTQSNSGTLQQSRLLFSQAGPTSMSLQAKNWLPGPCYRQQRLSKQANDNNNSNFPWTAATKYHLNGRDSLVNPGPAMASHKDDEEKFFPMHGTLIFGKQGTNANDADLDNVMITDEEEIRTTNPVATEQYGTVSNNLQNSNTGPTTGTVNHQGALPGMVWQDRDVYLQGPIWAKIPHTDGHFHPSPLMGGFGLKHPPPQIMIKNTPVPANPPTNFSSAKFASFITQYSTGQVSVEIEWELQKENSKRWNPEIQYTSNYNKSVNVDFTVDTNGVYSEPRPIGTRYLTRNL

SEQ ID NO: 4259 - protein, 735 aa, synthetic construct
  REGION 1..735: note = source = /note="Description of Artificial Sequence: Synthetic polypeptide"
MAADGYLPDWLEDTLSEGIRQWWKLKPGPPPPKPAERHKDDSRGLVLPGYKYLGPFNGLDKGEPVNGADAAALEHDKAYDRQLDSGDNPYLKYNHADAEFQERLKEDTSFGGNLGRAVFQAKKRVLEPLGLVEEPVKTAPGKKRPVEHSPVEPDSSSGTGKAGQQPARKRLNFGQTGDADSVPDPQPLGQPPAAPTSLGSTTMATGSGAPMADNNEGADGVGNSSGNWHCDSQWLGDRVITTSTRTWALPTYNNHLYKQISSQSGASNDNHYFGHSTPWGYFDFNRFHCHFSPRDWQRLINNNWGFRPKRLNFKLFNIQVKEVTQNDGTTTIANNLTSTVQVFTDSEYQLPYVLGSAHQGCLPPFPADVFMVPQYGYLTLNNGSQAVGRSSFYCLEYFPSQMLRTGNNFTFSYTFEDVPFHSSYAHSQSLDRLMNPLIDQYLYYLNKTQSNSGTLQQSRLLFSQAGPTSMSLQAKNWLPGPCYRQQRLSKQANDNNNSNFPWTAATKYHLNGRDSLVNPGPAMASHKDDEEKFFPMHGTLIFGKQGTNANDADLDNVMITDEEEIRTTNPVATEQYGTVSNNLQNSNTGPTTGTVNHQGALPGMVWQDRDVYLQGPIWAKIPHTDGHFHPSPLMGGFGLKHPPPQIMIKNTPVPANPPTNFSSAKFASFITQYSTGQVSVEIEWELQKENSKRWNPEIQYTSNYNKSVNVDFTVDTNGVYSEPRPIGTRYLTRNL

SEQ ID NO: 4260 - protein, 735 aa, synthetic construct
  REGION 1..735: note = source = /note="Description of Artificial Sequence: Synthetic polypeptide"
MAADGYLPDWLEDTLSEGIRQWWKLKPGPPPPKPAERHKDDSRGLVLPGYKYLGPFNGLDKGEPVNEADAAALEHDKAYDRQLDSGDNPYLKYNHADAEFQERLKEDTSFGGNLGRAVFQAKKRVLEPLGLVEEPVKTAPGKKRPVEHSPVEPDSSSGTGKAGQQPARKRLNFGQTGDADSVPDPQPLGQPPAAPTSLGSTTMATGSGAPMADNNEGADGVGNSSGNWHCDSQWLGDRVITTSTRTWALPTYNNHLYKQISSQSGASNDNHYFGHSTPWGYFDFNRFHCHFSPRDWQRLINNNWGFRPKRLNFKLFNIQVKEVTQNDGTTTIANNLTSTVQVFTDSEYQLPYVLGSAHQGCLPPFPADVFMVPQYGYLTLNNGSQAVGRSSLYCLEYFPSQMLRTGNNFTFSYTFEDVPFHSSYAHSQSLDRLMNPLIDQYLYYLNKTQSNSGTLQQSRLLFSQAGPTSMSLQAKNWLPGPCYRQQRLSKQANDNNNSNFPWTAATKYHLNGRDSLVNPGPAMASHKDDEEKFFPMHGTLIFGKQGTNANDADLDNVMITDEEEIRTTNPVATEQYGTVSNNLQNSNTGPTTGTVNHQGALPGMVWQDRDVYLQGPIWAKIPHTDGHFHPSPLMGGFGLKHPPPQIMIKNTPVPANPPTNFSSAKFASFITQYSTGQVSVEIEWELQKENSKRWNPEIQYTSNYNKSVNVDFTVDTNGVYSEPRPIGTRYLTRNL

SEQ ID NO: 4261 - protein, 735 aa, synthetic construct
  REGION 1..735: note = source = /note="Description of Artificial Sequence: Synthetic polypeptide"
MAADGYLPDWLEDTLSEGIRQWWKLKPGPPPPKPAERHKDDSRGLVLPGYKYLGPFNGLDKGEPVNEADAAALEHDKAYDRQLDSGDNPYLKYNHADAEFQERLKEDTSFGGNLGRAVFQAKKRVLEPLGLVEEPVKTAPGKKRPVEHSPVEPDSSSGTGKAGQQPARKRLNFGQTGDADSVPDPQPLGQPPAAPTSLGSTTMATGSGAPMADNNEGADGVGNSSGNWHCDSQWLGDRVITTSTRTWALPTYNNHLYKQISSQSGASNDNHYFGHSTPWGYFDFNRFHCHFSPRDWQRLINNNWGFRPKRLNFKLFNIQVKEVTQNDGTTTIANNLTSTVQVFTDSEYQLPYVLGSAHQGCLPPFPADVFMVPQYGYLTLNNGSQAVGRSSFYCLEYFPSQMLRTGNNFTSSYTFEDVPFHSSYAHSQSLDRLMNPLIDQYLYYLNKTQSNSGTLQQSRLLFSQAGPTSMSLQAKNWLPGPCYRQQRLSKQANDNNNSNFPWTAATKYHLNGRDSLVNPGPAMASHKDDEEKFFPMHGTLIFGKQGTNANDADLDNVMITDEEEIRTTNPVATEQYGTVSNNLQNSNTGPTTGTVNHQGALPGMVWQDRDVYLQGPIWAKIPHTDGHFHPSPLMGGFGLKHPPPQIMIKNTPVPANPPTNFSSAKFASFITQYSTGQVSVEIEWELQKENSKRWNPEIQYTSNYNKSVNVDFTVDTNGVYSEPRPIGTRYLTRNL

SEQ ID NO: 4262 - protein, 735 aa, synthetic construct
  REGION 1..735: note = source = /note="Description of Artificial Sequence: Synthetic polypeptide"
MAADGYLPDWLEDTLSEGIRQWWKLKPGPPPPKPAERHKDDSRGLVLPGYKYLGPFNGLDKGEPVNEADAAALEHDKAYDRQLDSGDNPYLKYNHADAEFQERLKEDTSFGGNLGRAVFQAKKRVLEPLGLVEEPVKTAPGKKRPVEHSPVEPDSSSGTGKAGQQPARKRLNFGQTGDADSVPDPQPLGQPPAAPTSLGSTTMATGSGAPMADNNEGADGVGNSSGNWHCDSQWLGDGVITTSTRTWALPTYNNHLYKQISSQSGASNDNHYFGHSTPWGYFDFNRFHCHFSPRDWQRLINNNWGFRPKRLNFKLFNIQVKEVTQNDGTTTIANNLTSTVQVFTDSEYQLPYVLGSAHQGCLPPFPADVFMVPQYGYLTLNNGSQAVGRSSFYCLEYFPSQMLRTGNNFTFSYTFEDVPFHSSYAHSQSLDRLMNPLIDQYLYYLNKTQSNSGTLQQSRLLFSQAGPTSMSLQAKNWLPGPCYRQQRLSKQANDNNNSNFPWTAATKYHLNGRDSLVNPGPAMASHKDDEEKFFPMHGTLIFGKQGTNANDADLDNVMITDEEEIRTTNPVATEQYGTVSNNLQNSNTGPTTGTVNHQGALPGMVWQDRDVYLQGPIWAKIPHTDGHFHPSPLMGGFGLKHPPPQIMIKNTPVPANPPTNFSSAKFASFITQYSTGQVSVEIEWELQKENSKRWNPEIQYTSNYNKSVNVDFTVDTNGVYSEPRPIGTRYLTRNL

SEQ ID NO: 4263 - protein, 735 aa, synthetic construct
  REGION 1..735: note = source = /note="Description of Artificial Sequence: Synthetic polypeptide"
MAADGYLPDWLEDTLSEGIRQWWKLKPGPPPPKPAERHKDDSRGLVLPGYKYLGPFNGLDKGEPVNEADAAALEHDKAYDRQLDSGDNPYLKYNHADAEFQERLKEDTSFGGNLGRAVFQAKKRVLEPLGLVEEPVKTAPGKKRPVEHSPVEPDSSSGTGKAGQQPARKRLNFGQTGDADSVPDPQPLGQPPAAPTSLGSTTMATGSGAPMADNNEGADGVGNSSGNWHCDSQWLGDRVITTSTRTWALPTYNNHLYKQISSQSGASNDNHYFGHSTPWGYFDFNRFHCHFSPRDWQRLINNNWGFRPKRLNFKLFNIQVKEVTQNDGTTTIANNLTSTVQVFTDSEYQLPYVLGSAHQGCLPPFPADVFMVPQYGYLTLNNGSQAVGRSSFYCLEYFPSQMLRTGNNFTFSYTFEDVPFHSSYAHSQSLDRLMNPLIDQYLYYLNKTQSNSGTLQQSRLLFSQAGPTSMSLQAKNWLPGPCYRQQRLSKQANDNNNSNFPWTAATKYHLNGRDSLVNPGPAMASHKDDEEKFFPMHGTLIFGKQGTNANDADLDNVMITDEEEIRTTNPVATEQYRTVSNNLQNSNTGPTTGTVNHQGALPGMVWQDRDVYLQGPIWAKIPHTDGHFHPSPLMGGFGLKHPPPQIMIKNTPVPANPPTNFSSAKFASFITQYSTGQVSVEIEWELQKENSKRWNPEIQYTSNYNKSVNVDFTVDTNGVYSEPRPIGTRYLTRNL

SEQ ID NO: 4264 - protein, 735 aa, synthetic construct
  REGION 1..735: note = source = /note="Description of Artificial Sequence: Synthetic polypeptide"
MAADGYLPDWLEDTLSEGIRQWWKLKPGPPPPKPAERHKDDSRGLVLPGYKYLGPFNGLDKGEPVNEADAAALEHDKAYDRQLDSGDNPYLKYNHADAEFQERLKEDTSFGGNLGRAVFQAKKRVLEPLGLVEEPVKTAPGKKRPVEHSPVEPDSSSGTGKAGQQPARKRLNFGQTGDADSVPDPQPLGQPPAAPTSLGSTTMATGSGAPMADNNEGADGVGNSSGNWHCDSQWLGDRVITTSTRTWALPTYNNHLYKQISSQSGASNDNHYFGHSTPWGYFDFNRFHCHFSPRDWQRLINNNWGFRPKRLNFKLFNIQVKEVTQNDGTTTIANNLTSTVRVFTDSEYQLPYVLGSAHQGCLPPFPADVFMVPQYGYLTLNNGSQAVGRSSFYCLEYFPSQMLRTGNNFTFSYTFEDVPFHSSYAHSQSLDRLMNPLIDQYLYYLNKTQSNSGTLQQSRLLFSQAGPTSMSLQAKNWLPGPCYRQQRLSKQANDNNNSNFPWTAATKYHLNGRDSLVNPGPAMASHKDDEEKFFPMHGTLIFGKQGTNANDADLDNVMITDEEEIRTTNPVATEQYGTVSNNLQNSNTGPTTGTVNHQGALPGMVWQDRDVYLQGPIWAKIPHTDGHFHPSPLMGGFGLKHPPPQIMIKNTPVPANPPTNFSSAKFASFITQYSTGQVSVEIEWELQKENSKRWNPEIQYTSNYNKSVNVDFTVDTNGVYSEPRPIGTRYLTRNL

SEQ ID NO: 4265 - protein, 735 aa, synthetic construct
  REGION 1..735: note = source = /note="Description of Artificial Sequence: Synthetic polypeptide"
MAADGYLPDWLEDTLSEGIRQWWKLKPGPPPPKPAERHKDDSRGLVLPGYKYLGPFNGLDKGEPVNEADAAALEHDKAYDRQLDSGDNPYLKYNHADAEFQERLKEDTSFGGNLGRAVFQAKKRVLEPLGLVEEPVKTAPGKKRPVEHSPVEPDSSSGTGKAGQQPARKRLNFGQTGDADSVPDPQPLGQPPAAPTSLGSTTMATGSGAPMADNNEGADGVGNSSGNWHCDSQWLGDRVITTSTRTWALPTYNNHLYKQISSQSGASNDNHYFGHSTPWGYFDFNRFHCHFSPRDWQRLINNNWGFRPKRLNFKLFNIQVKEVTQNDGTTTIANNLTSTVQVFTDSEYQLPYVLGSAHQGCLPPFPADVFMVPQYGYLTLNNGSQAVGRSSFYCLEYFPSQMLRTGNNFTFSYTFEDVPFHSSYAHSQSLDRLMNPLIDQYLYYLNKTQSNSGTLRQSRLLFSQAGPTSMSLQAKNWLPGPCYRQQRLSKQANDNNNSNFPWTAATKYHLNGRDSLVNPGPAMASHKDDEEKFFPMHGTLIFGKQGTNANDADLDNVMITDEEEIRTTNPVATEQYGTVSNNLQNSNTGPTTGTVNHQGALPGMVWQDRDVYLQGPIWAKIPHTDGHFHPSPLMGGFGLKHPPPQIMIKNTPVPANPPTNFSSAKFASFITQYSTGQVSVEIEWELQKENSKRWNPEIQYTSNYNKSVNVDFTVDTNGVYSEPRPIGTRYLTRNL

SEQ ID NO: 4266 - protein, 735 aa, synthetic construct
  REGION 1..735: note = source = /note="Description of Artificial Sequence: Synthetic polypeptide"
MAADGYLPDWLEDTLSEGIRQWWKLKPGPPPPKPAERHKDDSRGLVLPGYKYLGPFNGLDKGEPVNEADAAALEHDKAYDRQLDSGDNPYLKYNHADAEFQERLKEDTSFGGNLGRAVFQAKKRVLEPLGLVEEPVKTAPGKKRPVEHSPVEPDSSSGTGKAGQQPARKRLNFGQTGDADSVPDPQPLGQPPAAPTSLGSTTMATGSGAPMADNNEGADGVGNSSGNWHCDSQWLGDRVITTSTRTWALPTYNNHLYKQISSQSGASNDNHYFGHSTPWGYFDFNRFHCHFSPRDWQRLINNNWGFRPKRLNFKLFNIQVKEVTQNDGTTTIANNLTSTVQVFTDSEYQLPYVLGSAHQGCLPPFPADVFMVPQYGYLTLNNGSQAVGRSSFYCLEYFPSQMLRTGNNFTFSYTFEDVPFHSSYAHSQSLDRLMNPLIDQYLYYLNKTQSNSGTLQQSRLLFSQAGPTSMSLQAKNWLPGPCYRQQRLSKQANDNNNSNFPWTAATKYHLNGRDSLVNPGPAMASHKDDEEKFFPMHGTLIFGKQGTNANDADLDNVMITDEEEIRTTNPVATEQYGTVSNNLQNSNTGPTTGTVNRQGALPGMVWQDRDVYLQGPIWAKIPHTDGHFHPSPLMGGFGLKHPPPQIMIKNTPVPANPPTNFSSAKFASFITQYSTGQVSVEIEWELQKENSKRWNPEIQYTSNYNKSVNVDFTVDTNGVYSEPRPIGTRYLTRNL

SEQ ID NO: 4267 - protein, 735 aa, synthetic construct
  REGION 1..735: note = source = /note="Description of Artificial Sequence: Synthetic polypeptide"
MAADGYLPDWLEDTLSEGIRQWWKLKPGPPPPKPAERHKDDSRGLVLPGYKYLGPFNGLDKGEPVNEADAAALEHDKAYDRQLDSGDNPYLKYNHADAEFQERLKEDTSFGGNLGRAVFQAKKRVLEPLGLVEEPVKTAPGKKRPVEHSPVEPDSSSGTGKAGQQPARKRLNFGQTGDADSVPDPQPLGQPPAAPTSLGSTTMATGSGAPMADNNEGADGVGNSSGNWHCDSQWLGDRVITTSTRTWALPTYNNHLYKQISSQSGASNDNHYFGHSTPWGYFDFNRFHCHFSPRDWQRLINNNWGFRPKRLNFKLFNIQVKEVTQNDGTTTIANNLTSTVQVFTDSEYQLPYVLGSAHQGCLPPFPADVFMVPQYGYLTLNNGSQAVGRSSFYCLEYFPSQMLRTGNNFTFSYTFEDVPFHSSYAHSQSLDRLMNPLIDQYLYYLNKTQSNSGTLQQSRLLFSQAGPTSMSLQAKNWLPGPCYRQQRLSKQANDNNNGNFPWTAATKYHLNGRDSLVNPGPAMASHKDDEEKFFPMHGTLIFGKQGTNANDADLDNVMITDEEEIRTTNPVATEQYGTVSNNLQNSNTGPTTGTVNHQGALPGMVWQDRDVYLQGPIWAKIPHTDGHFHPSPLMGGFGLKHPPPQIMIKNTPVPANPPTNFSSAKFASFITQYSTGQVSVEIEWELQKENSKRWNPEIQYTSNYNKSVNVDFTVDTNGVYSEPRPIGTRYLTRNL

SEQ ID NO: 4268 - protein, 735 aa, synthetic construct
  REGION 1..735: note = source = /note="Description of Artificial Sequence: Synthetic polypeptide"
MAADGYLPDWLEDTLSEGIRQWWKLKPGPPPPKPAERHKDDSRGLVLPGYKYLGPFNGLDKGEPVNEADAAALEHDKAYDRQLDSGDNPYLKYNHADAEFQERLKEDTSFGGNLGRAVFQAKKRVLEPLGLVEEPVKTAPGKKRPVEHSPVEPDSSSGTGKAGQQPARKRLNFGQTGDADSVPDPQPLGQPPAAPTSLGSTTMATGSGAPMADNNEGADGVGNSSGNWHCDSQWLGDRVITTSTRTWALPTYNNHLYKQISSQSGASNDNHYFGHSTPWGYFDFNRFHCHFSPRDWQRLINNNWGFRPKRLNFKLFNIQVKEVTQNDGTTTIANNLTSTVQVFTDSEYQLPYVLGSAHQGCLPPFPADVFMVPQYGYLTLNNGSQAVGRSSFYCLEYFPSQMLRTGNNFTFSYTFEDVPFHSSYAHSQSLDRLMNPLIDQYLYYLNKTQSNSGTLQQSRLLFSQAGPTSMSLQAKNWLPGPCYRQQRLSKQANDNNNSNFPWTAATKYHLNGRDSLVNPGPAMASHKDDEEKFFPMHGTLIFGKQGTNANDADLDNVMITDEEEIRTTNPVATEQYGTVSNNLQNSNTGPTTGTVNHQGALPGMVWQDRDVYLQGPIWAKIPHTDGHFHPSPLMGGFGLKHPPPQIMIKNTPVPANPPTNFSSAKFASFITQYSTGQVSVEIEWELQKENGKRWNPEIQYTSNYNKSVNVDFTVDTNGVYSEPRPIGTRYLTRNL

SEQ ID NO: 4269 - protein, 735 aa, synthetic construct
  REGION 1..735: note = source = /note="Description of Artificial Sequence: Synthetic polypeptide"
MAADGYLPDWLEDALSEGIRQWWKLKPGPPPPKPAERHKDDSRGLVLPGYKYLGPFNGLDKGEPVNEADAAALEHDKAYDRQLDSGDNPYLKYNHADAEFQERLKEDTSFGGNLGRAVFQAKKRVLEPLGLVEEPVKTAPGKKRPVEHSPVEPDSSSGTGKAGQQPARKRLNFGQTGDADSVPDPQPLGQPPAAPTSLGSTTMATGSGAPMADNNEGADGVGNSSGNWHCDSQWLGDRVITTSTRTWALPTYNNHLYKQISSQSGASNDNHYFGHSTPWGYFDFNRFHCHFSPRDWQRLINNNWGFRPKRLNFKLFNIQVKEVTQNDGTTTIANNLTSTVQVFTDSEYQLPYVLGSAHQGCLPPFPADVFMVPQYGYLTLNNGSQAVGRSSFYCLEYFPSQMLRTGNNFTFSYTFEDVPFHSSYAHSQSLDRLMNPLIDQYLYYLNKTQSNSGTLQQSRLLFSQAGPTSMSLQAKNWLPGPCYRQQRLSKQANDNNNSNFPWTAATKYHLNGRDSLVNPGPAMASHKDDEEKFFPMHGTLIFGKQGTNANDADLDNVMITDEEEIRTTNPVATEQYGTVSNNLQNSNTGPTTGTVNHQGALPGMVWQDRDVYLQGPIWAKIPHTDGHFHPSPLMGGFGLKHPPPQIMIKNTPVPANPPTNFSSAKFASFITQYSTGQVSVEIEWELQKENSKRWNPEIQYTSNYNKSVNVDFTVDTNGVYSEPRPIGTRYLTRNL

SEQ ID NO: 4270 - protein, 735 aa, synthetic construct
  REGION 1..735: note = source = /note="Description of Artificial Sequence: Synthetic polypeptide"
MAADGYLPDWLEDTLSEGIRQWWKLKPGPPPPKPAERHKDDSRGLVLPGYKYLGPFNGLDKGEPVNEADAAALEHDKAYDRQLDSGDNPYLKYNHADAEFQERLKEDTPFGGNLGRAVFQAKKRVLEPLGLVEEPVKTAPGKKRPVEHSPVEPDSSSGTGKAGQQPARKRLNFGQTGDADSVPDPQPLGQPPAAPTSLGSTTMATGSGAPMADNNEGADGVGNSSGNWHCDSQWLGDRVITTSTRTWALPTYNNHLYKQISSQSGASNDNHYFGHSTPWGYFDFNRFHCHFSPRDWQRLINNNWGFRPKRLNFKLFNIQVKEVTQNDGTTTIANNLTSTVQVFTDSEYQLPYVLGSAHQGCLPPFPADVFMVPQYGYLTLNNGSQAVGRSSFYCLEYFPSQMLRTGNNFTFSYTFEDVPFHSSYAHSQSLDRLMNPLIDQYLYYLNKTQSNSGTLQQSRLLFSQAGPTSMSLQAKNWLPGPCYRQQRLSKQANDNNNSNFPWTAATKYHLNGRDSLVNPGPAMASHKDDEEKFFPMHGTLIFGKQGTNANDADLDNVMITDEEEIRTTNPVATEQYGTVSNNLQNSNTGPTTGTVNHQGALPGMVWQDRDVYLQGPIWAKIPHTDGHFHPSPLMGGFGLKHPPPQIMIKNTPVPANPPTNFSSAKFASFITQYSTGQVSVEIEWELQKENSKRWNPEIQYTSNYNKSVNVDFTVDTNGVYSEPRPIGTRYLTRNL

SEQ ID NO: 4271 - DNA, 2205 bp, synthetic construct
  misc_feature 1..2205: note = source = /note="Description of Artificial Sequence: Synthetic polynucleotide"
  source 1..2205: mol_type = other DNA
atggctgccgatggttatcttccagattggctcgaggacactctctctgaaggaataagacagtggtggaagctcaaacctggcccaccaccgccaaagcccgcagagcggcacaaggacgacagtaggggtcttgtgcttcctgggtacaagtacctcggacccttcaacggactcgacaaaggagagccggtcaacgaggcagacgccgcggccctcgagcacgacaaggcctacgaccggcagctcgacagcggagacaacccgtacctcaagtacaaccacgccgacgcggagtttcaggagcgtcttaaagaagatacgtcttttgggggcaacctcggacgagcagtattccaggcgaaaaagagggttcttgaacctctgggcctggttgaggagcctgttaagacggctccgggaaaaaagaggccggtagagcactctcctgtggagccagactcctcctcgggaaccggaaaggcgggccagcagcctgcaagaaaaagattgaattttggtcagactggagacgcagactcagtacctgacccccagcctctcggacagccaccagcagccccctctggtctgggaactaatacgatggctacaggcagtggcgcaccaatggcagacaataacgagggcgccgacggagtgggtaattcctcgggaaattggcattgcgattccacatggatgggcgacagagtcatcaccaccagcacccgaacctgggccctgcccacctacaacaaccacctctacaaacaaatttccagccaatcaggagcctcgaacgacaatcactactttggctacagcaccccttgggggtattttgacttcaacagattccactgccacttttcaccacgtgactggcaaagactcatcaacaacaactggggattccgacccaagagactcaacttcaagctctttaacattcaagtcaaagaggtcacgcagaatgacggtacgacgacgattgccaataaccttaccagcacggttcaggtgtttactgactcggagtaccagctcccgtacgtcctcggctcggcgcatcaaggatgcctcccgccgttcccagcagacgtcttcatggtgccacagtatggatacctcaccctgaacaacgggagtcaggcagtaggacgctcttcattttactgcctggagtactttccttctcagatgctgcgtaccggaaacaactttaccttcagctacacttttgaggacgttcctttccacagcagctacgctcacagccagagtctggaccgtctcatgaatcctctcatcgaccagtacctgtattacttgagcagaacacactccaatagtggaactcaccagcagtcaaggcttcagttttctcaggccggagcgagcatgtcgggaccagctaggaactggcttcctggaccctgttaccgccagcagcgagtatcaaagcagtctgcggataacaacaacagtgaatactcgtggactggagctaccaagtaccacctcaatggcagagactctctggtgaatccgggcccggccatggcaagccacaaggacgatgaagaaaagtttttcctcatgagcggggttctcatctttgggaagcaaggctcagatgaaaacaatgtggacattgaaaaggtcatgattacagacgaagaggaaatcaggacaaccaatcccgtggctacggagcagtatggttctgtatctaccaacctccaagaggcaaagacaagtccagctaccgcagatgtcaatcaccaaggcgttcttccaggcatggtctggcaggacagagatgtgtaccttcaggggcccatctgggcaaagattccacacacggacggacattttcacccctctcccctcatgggtggattcggacttaaacaccctcctccacagattctcatcaagaacaccccggtacctgcgaatccttcgaccaccttcagtgcggcaaagtttgcttccttcatcacacagtactccacgggacaggccagcgtggagatcgagtgggagctgcagaaggaaaacagcaaacgctggaatcccgaaattcagtacacttccaactacaacaagtctgttaatgtggactttactgtggacactaatggcgtgtattcagagcctcgccccattggcaccagatacctgactcgtaatctgtaa

SEQ ID NO: 4272 - DNA, 2205 bp, synthetic construct
  misc_feature 1..2205: note = source = /note="Description of Artificial Sequence: Synthetic polynucleotide"
  source 1..2205: mol_type = other DNA
atggctgccgatggttatcttccagattggctcgaggacactctctctgaaggaataagacagtggtggaagctcaaacctggcccaccaccgccaaagcccgcagagcggcacaaggacgacagtaggggtcttgtgcttcctgggtacaagtacctcggacccttcaacggactcgacaaaggagagccggtcaacgaggcagacgccgcggccctcgagcacgacaaggcctacgaccggcagctcgacagcggagacaacccgtacctcaagtacaaccacgccgacgcggagtttcaggagcgtcttaaagaagatacgtcttttgggggcaacctcggacgagcagtattccaggcgaaaaagagggttcttgaacctctgggcctggttgaggagcctgttaagacggctccgggaaaaaagaggccggtagagcactctcctgtggagccagactcctcctcgggaaccggaaaagcgggccagcagcctgcaagaaaaagattgaattttggtcagactggagacgcagactccgtacctgacccccagcctctcggacagccaccagcagcccccacaagtttgggatctactacaatggctacaggcagtggcgcaccaatggcagacaataacgagggtgccgatggagtgggtaattcctcaggaaattggcattgcgattcccaatggctgggcgacagagtcatcaccaccagcacccgaacctgggccctgcccacctacaacaaccacctctacaagcaaatctccagccaatcaggagcatcgaacgacaaccactactttggccacagcaccccttgggggtattttgacttcaacagattccactgtcacttctccccacgtgactggcaaagactcatcaacaacaactggggattccgacccaagagactcaacttcaagctctttaacattcaagtcaaagaggtcacgcagaatgacggtacgacgacgattgccaataaccttaccagcacggttcaggtgtttactgactcggagtaccagctcccgtacgtcctcggctcggcgcatcaaggatgcctcccgccgttcccagcagacgtcttcatggtgccacagtatggatacctcaccctgaacaacgggagtcaggcagtaggacgctcttcattttactgcctggagtacttcccttctcagatgctgcgtaccggaaacaactttaccttcagctacacttttgaggacgttcctttccacagcagctacgctcacagccagagtctggaccgtctcatgaatcctctcatcgaccagtacctgtattacttgagcagaacacactccaatagtggaactcaccagcagtcaaggcttcagttttctcaggccggagcgagcatgtcgggaccagctaggaactggcttcctggaccctgttaccgccagcagcgagtatcaaagcagtctgcggataacaacaacagtgaatactcgtggactggagctaccaagtaccgcctcaatggcagagactctctggtgaatccgggctcggccatggcaagccacaaggacgatgaagaaaagtttttcctcatgagcggggttctcatctttgggaagcaaggctcagatgaaaacaatgtggacattgaaaaggtcatgattacagacgaagaggaaatcaggacaaccaatcccgtggctacggagcagtatggttctgtatctaccaacctccaagaggcaaagacaagtccagctaccgcagatgtcaatcaccaaggcgttcttccaggcatggtctggcaggacagagatgtgtaccttcaggggcccatctgggcaaagattccacacacggacggacattttcacccctctcccctcatgggtggattcggacttaaacaccctcctccacagattctcatcaagaacaccccggtacctgcgaatccttcgaccaccttcagtgcggcaaagtttgcttccttcatcacacagtactccacgggacaggtcagcgtggagatcgagtgggagctgcagaaggaaaacagcaaacgctggaatcccgaaattcagtacacttccaactacaacaagtctgttaatgtggactttactgtggacactaatggcgtgtattcagagcctcgccccattggcaccagatacctgactcgtaatctgtaa

SEQ ID NO: 4273 - DNA, 2205 bp, synthetic construct
  misc_feature 1..2205: note = source = /note="Description of Artificial Sequence: Synthetic polynucleotide"
  source 1..2205: mol_type = other DNA
atggctgccgatggttatcttccagattggctcgaggacactctctctgaaggaataagacagtggtggaagctcaaacctggcccaccaccgccaaagcccgcagagcggcacaaggacgacagtaggggtcttgtgcttcctgggtacaagtacctcggacccttcaacggactcgacaaaggagagccggtcaacgaggcagacgccgcggccctcgagcacgacaaggcctacgaccggcagctcgacagcggagacaacccgtacctcaagtacaaccacgccgacgcggagtttcaggagcgtcttaaagaagatacgtcttttgggggcaacctcggacgagcagtattccaggcgaaaaagagggttcttgaacctctgggcctggttgaggagcctgttaagacggctccgggaaaaaagaggccggtagagcactctcctgtggagccagactcctcctcgggaaccggaaaggcgggccagcagcctgcaagaaaaagattgaattttggtcagactggagacgcagactcagtacctgacccccagcctctcggacagccaccagcagccccctctggtctgggaactaatacgatggctacaggcagtggcgcaccaatggcagacaataacgagggcgccgacggagtgggtaattcctcgggaaattggcattgcgattccacatggatgggcgacagagtcatcaccaccagcacccgaacctgggccctgcccacctacaacaaccacctctacaaacaaatttccagccaatcaggagcctcgaacgacaatcactactttggctacagcaccccttgggggtattttgacttcaacagattccactgccacttttcaccacgtgactggcaaagactcatcaacaacaactggggattccgacccaagagactcaacttcaagctctttaacattcaagtcaaagaggtcacgcagaatgacggtacgacgacgattgccaataaccttaccagcacggttcaggtgtttactgactcggagtaccagctcccgtacgtcctcggctcggcgcatcaaggatgcctcccgccgttcccagcagacgtcttcatggtgccacagtatggatacctcaccctgaacaacgggagtcaggcagtaggacgctcttcattttactgcctggagtacttcccttctcagatgctgcgtaccggaaacaactttaccttcagctacacttttgaggacgttcctttccacagcagctacgctcacagccagagtctggaccgtctcatgaatcctctcatcgaccagtacctgtattacttgagcagaacacactccaatagtggaactcaccagcagtcaaggcttcagttttctcaggccggagcgagcatgtcgggaccagctaggaactggcttcctggaccctgttaccgccagcagcgagtatcaaagcagtctgcggataacaacaacagtgaatactcgtggactggagctaccaagtaccgcctcaatggcagagactctctggtgaatccgggctcggccatggcaagccacaaggacgatgaagaaaagtttttcctcatgagcggggttctcatctttgggaagcaaggctcagatgaaaacaatgtggacattgaaaaggtcatgattacagacgaagaggaaatcaggacaaccaatcccgtggctacggagcagtatggttctgtatctaccaacctccaagaggcaaagacaagtccagctaccgcagatgtcaatcaccaaggcgttcttccaggcatggtctggcaggacagagatgtgtaccttcaggggcccatctgggcaaagattccacacacggacggacattttcacccctctcccctcatgggtggattcggacttaaacaccctcctccacagattctcatcaagaacaccccggtacctgcgaatccttcgaccaccttcagtgcggcaaagtttgcttccttcatcacacagtactccacgggacaggtcagcgtggagatcgagtgggagctgcagaaggaaaacagcaaacgctggaatcccgaaattcagtacacttccaactacaacaagtctgttaatgtggactttactgtggacactaatggcgtgtattcagagcctcgccccattggcaccagatacctgactcgtaatctgtaa

SEQ ID NO: 4274 - DNA, 2205 bp, synthetic construct
  misc_feature 1..2205: note = source = /note="Description of Artificial Sequence: Synthetic polynucleotide"
  source 1..2205: mol_type = other DNA
atggctgccgatggttatcttccagattggctcgaggacactctctctgaaggaataagacagtggtggaagctcaaacctggcccaccaccgccaaagcccgcagagcggcacaaggacgacagtaggggtcttgtgcttcctgggtacaagtacctcggacccttcaacggactcgacaaaggagagccggtcaacgaggcagacgccgcggccctcgagcacgacaaggcctacgaccggcagctcgacagcggagacaacccgtacctcaagtacaaccacgccgacgcggagtttcaggagcgtcttaaagaagatacgtcttttgggggcaacctcggacgagcagtattccaggcgaaaaagagggttcttgaacctctgggcctggttgaggagcctgttaagacggctccgggaaaaaagaggccggtagagcactctcctgtggagccagactcctcctcgggaaccggaaaagcgggccagcagcctgcaagaaaaagattgaattttggtcagactggagacgcagactccgtacctgacccccagcctctcggacagccaccagcagcccccacaagtttgggatctactacaatggctacaggcagtggcgcaccaatggcagacaataacgagggtgccgatggagtgggtaattcctcaggaaattggcattgcgattcccaatggctgggcgacagagtcatcaccaccagcacccgaacctgggccctgcccacctacaacaaccacctctacaagcaaatctccagccaatcaggagcatcgaacgacaaccactactttggccacagcaccccttgggggtattttgacttcaacagattccactgtcacttctccccacgtgactggcaaagactcatcaacaacaactggggattccgacccaagagactcaacttcaagctctttaacattcaagtcaaagaggtcacgcagaatgacggtacgacgacgattgccaataaccttaccagcacggttcaggtgtttactgactcggagtaccagctcccgtacgtcctcggctcggcgcatcaaggatgcctcccgccgttcccagcagacgtcttcatggtgccacagtatggatacctcaccctgaacaacgggagtcaggcagtaggacgctcttcattttactgcctggagtactttccttctcagatgctgcgtaccggaaacaactttaccttcagctacacttttgaggacgttcctttccacagcagctacgctcacagccagagtctggaccgtctcatgaatcctctcatcgaccagtacctgtattacttgagcagaacacactccaatagtggaactcaccagcagtcaaggcttcagttttctcaggccggagcgagcatgtcgggaccagctaggaactggcttcctggaccctgttaccgccagcagcgagtatcaaagcagtctgcggataacaacaacagtgaatactcgtggactggagctaccaagtaccacctcaatggcagagactctctggtgaatccgggcccggccatggcaagccacaaggacgatgaagaaaagtttttcctcatgagcggggttctcatctttgggaagcaaggctcagatgaaaacaatgtggacattgaaaaggtcatgattacagacgaagaggaaatcaggacaaccaatcccgtggctacggagcagtatggttctgtatctaccaacctccaagaggcaaagacaagtccagctaccgcagatgtcaatcaccaaggcgttcttccaggcatggtctggcaggacagagatgtgtaccttcaggggcccatctgggcaaagattccacacacggacggacattttcacccctctcccctcatgggtggattcggacttaaacaccctcctccacagattctcatcaagaacaccccggtacctgcgaatccttcgaccaccttcagtgcggcaaagtttgcttccttcatcacacagtactccacgggacaggccagcgtggagatcgagtgggagctgcagaaggaaaacagcaaacgctggaatcccgaaattcagtacacttccaactacaacaagtctgttaatgtggactttactgtggacactaatggcgtgtattcagagcctcgccccattggcaccagatacctgactcgtaatctgtaa

SEQ ID NO: 4275 - DNA, 2205 bp, synthetic construct
  misc_feature 1..2205: note = source = /note="Description of Artificial Sequence: Synthetic polynucleotide"
  source 1..2205: mol_type = other DNA
atggctgccgatggttatcttccagattggctcgaggacactctctctgaaggaataagacagtggtggaagctcaaacctggcccaccaccgccaaagcccgcagagcggcacaaggacgacagtaggggtcttgtgcttcctgggtacaagtacctcggacccttcaacggactcgacaaaggagagccggtcaacgaggcagacgccgcggccctcgagcacgacaaggcctacgaccggcagctcgacagcggagacaacccgtacctcaagtacaaccacgccgacgcggagtttcaggagcgtcttaaagaagatacgtcttttgggggcaacctcggacgagcagtattccaggcgaaaaagagggttcttgaacctctgggcctggttgaggagcctgttaagacggctccgggaaaaaagaggccggtagagcactctcctgtggagccagactcctcctcgggaaccggaaaagcgggccagcagcctgcaagaaaaagattgaattttggtcagactggagacgcagactccgtacctgacccccagcctctcggacagccaccagcagcccccacaagtttgggatctactacaatggctacaggcagtggcgcaccaatggcagacaataacgagggtgccgatggagtgggtaattcctcaggaaattggcattgcgattcccaatggctgggcgacagagtcatcaccaccagcacccgaacctgggccctgcccacctacaacaaccacctctacaagcaaatctccagccaatcaggagcatcgaacgacaaccactactttggctacagcaccccttgggggtattttgacttcaacagattccactgtcacttctccccacgtgactggcaaagactcatcaacaacaactggggattccgacccaagagactcaacttcaagctctttaacattcaagtcaaagaggtcacgcagaatgacggtacgacgacgattgccaataaccttaccagcacggttcaggtgtttactgactcggagtaccagctcccgtacgtcctcggctcggcgcatcaaggatgcctcccgccgttcccagcagacgtcttcatggtgccacagtatggatacctcaccctgaacaacgggagtcaggcagtaggacgctcttcattttactgcctggagtacttcccttctcagatgctgcgtaccggaaacaactttaccttcagctacacttttgaggacgttcctttccacagcagctacgctcacagccagagtctggaccgtctcatgaatcctctcatcgaccagtacctgtattacttgagcagaacacactccaatagtggaactcaccagcagtcaaggcttcagttttctcaggccggagcgagcatgtcgggaccagctaggaactggcttcctggaccctgttaccgccagcagcgagtatcaaagcagtctgcggataacaacaacagtgaatactcgtggactggagctaccaagtaccgcctcaatggcagagactctctggtgaatccgggctcggccatggcaagccacaaggacgatgaagaaaagtttttcctcatgagcggggttctcatctttgggaagcaaggctcagatgaaaacaatgtggacattgaaaaggtcatgattacagacgaagaggaaatcaggacaaccaatcccgtggctacggagcagtatggttctgtatctaccaacctccaagaggcaaagacaagtccagctaccgcagatgtcaatcaccaaggcgttcttccaggcatggtctggcaggacagagatgtgtaccttcaggggcccatctgggcaaagattccacacacggacggacattttcacccctctcccctcatgggtggattcggacttaaacaccctcctccacagattctcatcaagaacaccccggtacctgcgaatccttcgaccaccttcagtgcggcaaagtttgcttccttcatcacacagtactccacgggacaggtcagcgtggagatcgagtgggagctgcagaaggaaaacagcaaacgctggaatcccgaaattcagtacacttccaactacaacaagtctgttaatgtggactttactgtggacactaatggcgtgtattcagagcctcgccccattggcaccagatacctgactcgtaatctgtaa

SEQ ID NO: 4276 - DNA, 2205 bp, synthetic construct
  misc_feature 1..2205: note = source = /note="Description of Artificial Sequence: Synthetic polynucleotide"
  source 1..2205: mol_type = other DNA
atggctgccgatggttatcttccagattggctcgaggacactctctctgaaggaataagacagtggtggaagctcaaacctggcccaccaccgccaaagcccgcagagcggcacaaggacgacagtaggggtcttgtgcttcctgggtacaagtacctcggacccttcaacggactcgacaaaggagagccggtcaacgaggcagacgccgcggccctcgagcacgacaaggcctacgaccggcagctcgacagcggagacaacccgtacctcaagtacaaccacgccgacgcggagtttcaggagcgtcttaaagaagatacgtcttttgggggcaacctcggacgagcagtattccaggcgaaaaagagggttcttgaacctctgggcctggttgaggaacctgttaagacggctccgggaaaaaagaggccggtagagcactctcctgtggagccagactcctcctcgggaaccggaaaggcgggccagcagcctgcaagaaaaagattgaattttggtcagactggagacgcagactcagtacctgacccccagcctctcggacagccaccagcagccccctctggtctgggaactaatacgatggctacaggcagtggcgcaccaatggcagacaataacgagggcgccgacggagtgggtaattcctcgggaaattggcattgcgattccacatggatgggcgacagagtcatcaccaccagcacccgaacctgggccctgcccacctacaacaaccacctctacaaacaaatttccagccaatcaggagcctcgaacgacaatcactactttggctacagcaccccttgggggtattttgacttcaacagattccactgccacttttcaccacgtgactggcaaagactcatcaacaacaactggggattccgacccaagagactcaacttcaagctctttaacattcaagtcaaagaggtcacgcagaatgacggtacgacgacgattgccaataaccttaccagcacggttcaggtgtttactgactcggagtaccagctcccgtacgtcctcggctcggcgcatcaaggatgcctcccgccgttcccagcagacgtcttcatggtgccacagtatggatacctcaccctgaacaacgggagtcaggcagtaggacgctcttcattttactgcctggagtacttcccttctcagatgctgcgtaccggaaacaactttaccttcagctacacttttgaggacgttcctttccacagcagctacgctcacagccagagtctggaccgtctcatgaatcctctcatcgaccagtacctgtattacttgagcagaacacactccaatagtggaactcaccagcagtcaaggcttcagttttctcaggccggagcgagcatgtcgggaccagctaggaactggcttcctggaccctgttaccgccagcagcgagtatcaaagcagtctgcggataacaacaacagtgaatactcgtggactggagctaccaagtaccgcctcaatggcagagactctctggtgaatccgggctcggccatggcaagccacaaggacgatgaagaaaagtttttcctcatgagcggggttctcatctttgggaagcaaggctcagatgaaaacaatgtggacattgaaaaggtcatgattacagacgaagaggaaatcaggacaaccaatcccgtggctacggagcagtatggttctgtatctaccaacctccaagaggcaaagacaagtccagctaccgcagatgtcaatcaccaaggcgttcttccaggcatggtctggcaggacagagatgtgtaccttcaggggcccatctgggcaaagattccacacacggacggacattttcacccctctcccctcatgggtggattcggacttaaacaccctcctccacagattctcatcaagaacaccccggtacctgcgaatccttcgaccaccttcagtgcggcaaagtttgcttccttcatcacacagtactccacgggacaggccagcgtggagatcgagtgggagctgcagaaggaaaacagcaaacgctggaatcccgaaattcagtacacttccaactacaacaagtctgttaatgtggactttactgtggacactaatggcgtgtattcagagcctcgccccattggcaccagatacctgactcgtaatctgtaa

SEQ ID NO: 4277 - DNA, 2205 bp, synthetic construct
  misc_feature 1..2205: note = source = /note="Description of Artificial Sequence: Synthetic polynucleotide"
  source 1..2205: mol_type = other DNA
atggctgccgatggttatcttccagattggctcgaggacactctctctgaaggaataagacagtggtggaagctcaaacctggcccaccaccgccaaagcccgcagagcggcacaaggacgacagtaggggtcttgtgcttcctgggtacaagtacctcggacccttcaacggactcgacaaaggagagccggtcaacgaggcagacgccgcggccctcgagcacgacaaggcctacgaccggcagctcgacagcggagacaacccgtacctcaagtacaaccacgccgacgcggagtttcaggagcgtcttaaagaagatacgtcttttgggggcaacctcggacgagcagtattccaggcgaaaaagagggttcttgaacctctgggcctggttgaggagcctgttaagacggctccgggaaaaaagaggccggtagagcactctcctgtggagccagactcctcctcgggaaccggaaaagcgggccagcagcctgcaagaaaaagattgaattttggtcagactggagacgcagactccgtacctgacccccagcctctcggacagccaccagcagcccccacaagtttgggatctactacaatggctacaggcagtggcgcaccaatggcagacaataacgagggtgccgatggagtgggtaattcctcgggaaattggcattgcgattccacatggatgggcgacagagtcatcaccaccagcacccgaacctgggccctgcccacctacaacaaccacctctacaaacaaatttccagccaatcaggagcctcgaacgacaatcactactttggctacagcaccccttgggggtattttgacttcaacagattccactgccacttttcaccacgtgactggcaaagactcatcaacaacaactggggattccgacccaagagactcaacttcaagctctttaacattcaagtcaaagaggtcacgcagaatgacggtacgacgacgattgccaataaccttaccagcacggttcaggtgtttactgactcggagtaccagctcccgtacgtcctcggctcggcgcatcaaggatgcctcccgccgttcccagcagacgtcttcatggtgccacagtatggatacctcaccctgaacaacgggagtcaggcagtaggacgctcttcattttactgcctggagtacttcccttctcagatgctgcgtaccggaaacaactttaccttcagctacacttttgaggacgttcctttccacagcagctacgctcacagccagagtctggaccgtctcatgaatcctctcatcgaccagtacctgtattacttgagcagaacacactccaatagtggaactcaccagcagtcaaggcttcagttttctcaggccggagcgagcatgtcgggaccagctaggaactggcttcctggaccctgttaccgccagcagcgagtatcaaagcagtctgcggataacaacaacagtgaatactcgtggactggagctaccaagtaccgcctcaatggcagagactctctggtgaatccgggctcggccatggcaagccacaaggacgatgaagaaaagtttttcctcatgagcggggttctcatctttgggaagcaaggctcagatgaaaacaatgtggacattgaaaaggtcatgattacagacgaagaggaaatcaggacaaccaatcccgtggctacggagcagtatggttctgtatctaccaacctccaagaggcaaagacaagtccagctaccgcagatgtcaatcaccaaggcgttcttccaggcatggtctggcaggacagagatgtgtaccttcaggggcccatctgggcaaagattccacacacggacggacattttcacccctctcccctcatgggtggattcggacttaaacaccctcctccacagattctcatcaagaacaccccggtacctgcgaatccttcgaccaccttcagtgcggcaaagtttgcttccttcatcacacagtactccacgggacaggtcagcgtggagatcgagtgggagctgcagaaggaaaacagcaaacgctggaatcccgaaattcagtacacttccaactacaacaagtctgttaatgtggactttactgtggacactaatggcgtgtattcagagcctcgccccattggcaccagatacctgactcgtaatctgtaa

SEQ ID NO: 4278 - DNA, 2205 bp, synthetic construct
  misc_feature 1..2205: note = source = /note="Description of Artificial Sequence: Synthetic polynucleotide"
  source 1..2205: mol_type = other DNA
atggctgccgatggttatcttccagattggctcgaggacactctctctgaaggaataagacagtggtggaagctcaaacctggcccaccaccaccaaagcccgcagagcggcataaggacgacagcaggggtcttgtgcttcctgggtacaagtacctcggacccttcaacggactcgacaagggagagccggtcaacgaggcagacgccgcggccctcgagcacgacaaagcctacgaccggcagctcgacagcggagacaacccgtacctcaagtacaaccacgccgacgcggagtttcaggagcgccttaaagaagatacgtcttttgggggcaacctcggacgagcagtcttccaggcgaaaaagagggttcttgaacctctgggcctggttgaggaacctgttaagacggctccgggaaaaaagaggccggtagagcactctcctgtggagccagactcctcctcgggaaccggaaaggcgggccagcagcctgcaagaaaaagattgaattttggtcagactggagacgcagactcagtacctgacccccagcctctcggacagccaccagcagccccctctggtctgggaactaatacgatggctacaggcagtggcgcaccaatggcagacaataacgagggcgccgacggagtgggtaattcctcgggaaattggcattgcgattccacatggatgggcgacagagtcatcaccaccagcacccgaacctgggccctgcccacctacaacaaccacctctacaaacaaatttccagccaatcaggagcctcgaacgacaatcactactttggctacagcaccccttgggggtattttgacttcaacagattccactgccacttttcaccacgtgactggcaaagactcatcaacaacaactggggattccgacccaagagactcaacttcaagctctttaacattcaagtcaaagaggtcacgcagaatggcggtacgacgacgattgccaataaccttaccagcacggttcaggtgtttactgactcggagtaccagctcccgtacgtcctcggctcggcgcatcaaggatgcctcccgccgttcccagcagacgtcttcatggtgccacagtatggatacctcaccctgaacaacgggagtcaggcagtaggacgctcttcattttactgcctggagtacttcccttctcagatgctgcgtaccggaaacaactttaccttcagctacacttttgaggacgttcctttccacagcagctacgctcacagccagagtctggaccgtctcatgaatcctctcatcgaccagtacctgtattacttgagcagaacacactccaatagtggaactcaccagcagtcaaggcttcagttttctcaggccggagcgagcatgtcgggaccagctaggaactggcttcctggaccctgttaccgccagcagcgagtatcaaagcagtctgcggataacaacaacagtgaatactcgtggactggagctaccaagtaccgcctcaatggcagagactctctggtgaatccgggctcggccatggcaagccacaaggacgatgaagaaaagtttttcctcatgagcggggttctcatctttgggaagcaaggctcagatgaaaacaatgtggacattgaaaaggtcatgattacagacgaagaggaaatcaggacaaccaatcccgtggctacggagcagtatggttctgtatctaccaacctccaagaggcaaagacaagtccagctaccgcagatgtcaatcaccaaggcgttcttccaggcatggtctggcaggacagagatgtgtaccttcaggggcccatctgggcaaagattccacacacggacggacattttcacccctctcccctcatgggtggattcggacttaaacaccctcctccacagattctcatcaagaacaccccggtacctgcgaatccttcgaccaccttcagtgcggcaaagtttgcttccttcatcacacagtactccacgggacaggtcagcgtggagatcgagtgggagctgcagaaggaaaacagcaaacgctggaatcccgaaattcagtacacttccaactacaacaagtctgttaatgtggactttactgtggacactaatggcgtgtattcagagcctcgccccattggcaccagatacctgactcgtaatctgtaa

SEQ ID NO: 4279 - DNA, 2208 bp, synthetic construct
  misc_feature 1..2208: note = source = /note="Description of Artificial Sequence: Synthetic polynucleotide"
  source 1..2208: mol_type = other DNA
atggctgccgatggttatcttccagattggctcgaggacactctctctgaaggaataagacagtggtggaagctcaaacctggcccaccaccaccaaagcccgcagagcggcataaggacgacagcaggggtcttgtgcttcctgggtacaagtacctcggacccttcaacggactcgacaagggagagccggtcaacgaggcagacgccgcggccctcgagcacgacaaagcctacgaccggcagctcgacagcggagacaacccgtacctcaagtacaaccacgccgacgcggagtttcaggagcgccttaaagaagatacgtcttttgggggcaacctcggacgagcagtcttccaggcgaaaaagagggttcttgaacctctgggcctggttgaggaacctgttaagacggctccgggaaaaaagaggccggtagagcactctcctgtggagccagactcctcctcgggaaccggaaaggcgggccagcagcctgcaagaaaaagattgaattttggtcagactggagacgcagactcagtacctgacccccagcctctcggacagccaccagcagccccctctggtctgggaactaatacgatggctacaggcagtggcgcaccaatggcagacaataacgagggcgccgacggagtgggtaattcctcgggaaattggcattgcgattccacatggatgggcgacagagtcatcaccaccagcacccgaacctgggccctgcccacctacaacaaccacctctacaaacaaatttccagccaatcaggagcctcgaacgacaatcactactttggctacagcaccccttgggggtattttgacttcaacagattccactgccacttttcaccacgtgactggcaaagactcatcaacaacaactggggattccgacccaggagactcaacttcaagctctttaacattcaagtcaaagaggtcacgcagaatgacggtacgacgacgattgccaataaccttaccagcacggttcaggtgtttactgactcggagtaccagctcccgtacgtcctcggctcggcgcatcaaggatgcctcccgccgttcccagcagacgtcttcatggtgccacagtatggatacctcaccctgaacaacgggagtcaggcagtaggacgctcttcattttactgcctggagtactttccttctcagatgctgcgtaccggaaacaactttaccttcagctacacttttgaggacgttcctttccacagcagctacgctcacagccagagtctggaccgtctcatgaatcctctcatcgaccagtacctgtattacttgagcagaacaaacactccaagtggaaccaccacgcagtcaaggcttcagttttctcaggccggagcgagtgacattcgggaccagtctaggaactggcttcctggaccctgttaccgccagcagcgagtatcaaagacatctgcggataacaacaacagtgaatactcgtggactggagctaccaagtaccacctcaatggcagagactctctggtgaatccgggcccggccatggcaagccacaaggacgatgaagaaaagttttttcctcagagcggggttctcatctttgggaagcaaggctcagagaaaacaaatgtggacattgaaaaggtcatgattacagacgaagaggaaatcaggacaaccaatcccgtggctacggagcagtatggttctgtatctaccaacctccagagaggcaacagacaagcagctaccgcagatgtcaacacacaaggcgttcttccaggcatggtctggcaggacagagatgtgtaccttcaggggcccatctgggcaaagattccacacacggacggacattttcacccctctcccctcatgggtggattcggacttaaacaccctcctccacagattctcatcaagaacaccccggtacctgcgaatccttcgaccaccttcagtgcggcaaagtttgcttccttcatcacacagtactccacgggacaggtcagcgtggagatcgagtgggagctgcagaaggaaaacagcaaacgctggaatcccgaaattcagtacacttccaactacaacaagtctgttaatgtggactttactgtggacactaatggcgtgtattcagagcctcgccccattggcaccagatacctgactcgtaatctgtaa

SEQ ID NO: 4280 - DNA, 2208 bp, synthetic construct
  misc_feature 1..2208: note = source = /note="Description of Artificial Sequence: Synthetic polynucleotide"
  source 1..2208: mol_type = other DNA
atggctgccgatggttatcttccagattggctcgaggacactctctctgaaggaataagacagtggtggaagctcaaacctggcccaccaccaccaaagcccgcagagcggcataaggacgacagcaggggtcttgtgcttcctgggtacaagtacctcggacccttcaacggactcgacaagggagagccggtcaacgaggcagacgccgcggccctcgagcacgacaaagcctacgaccggcagctcgacagcggagacaacccgtacctcaagtacaaccacgccgacgcggagtttcaggagcgccttaaagaagatacgtcttttgggggcaacctcggacgagcagtcttccaggcgaaaaagagggttcttgaacctctgggcctggttgaggaacctgttaagacggctccgggaaaaaagaggccggtagagcactctcctgtggagccagactcctcctcgggaaccggaaaggcgggccagcagcctgcaagaaaaagattgaattttggtcagactggagacgcagactcagtacctgacccccagcctctcggacagccaccagcagccccctctggtctgggaactaatacgatggctacaggcagtggcgcaccaatggcagacaataacgagggcgccgacggagtgggtaattcctcgggaaattggcattgcgattccacatggatgggcgacagagtcatcaccaccagcacccgaacctgggccctgcccacctacaacaaccacctctacaaacaaatttccagccaatcaggagcctcgaacgacaatcactactttggctacagcaccccttgggggtattttgacttcaacagattccactgccacttttcaccacgtgactggcaaagactcatcaacaacaactggggattccgacccaagagactcaacttcaagctctttaacattcaagtcaaagaggtcacgcagaatgacggtacgacgacgattgccaataaccttaccagcacggttcaggtgtttactgactcggagtaccagctcccgtacgtcctcggctcggcgcatcaaggatgcctcccgccgttcccagcagacgtcttcatggtgccacagtatggatacctcaccctgaacaacgggagtcaggcagtaggacgctcttcattttactgcctggagtactttccttctcagatgctgcgtaccggaaacaactttaccttcagctacacttttgaggacgttcctttccacagcagctacgctcgcagccagagtctggaccgtctcatgaatcctctcatcgaccagtacctgtattacttgagcagaacaaacactccaagtggaaccaccacgcagtcaaggcttcagttttctcaggccggagcgagtgacattcgggaccagtctaggaactggcttcctggaccctgttaccgccagcagcgagtatcaaagacatctgcggataacaacaacagtgaatactcgtggactggagctaccaagtaccacctcaatggcagagactctctggtgaatccgggcccggccatggcaagccacaaggacgatgaagaaaagttttttcctcagagcggggttctcatctttgggaagcaaggctcagagaaaacaaatgtggacattgaaaaggtcatgattacagacgaagaggaaatcaggacaaccaatcccgtggctacggagcagtatggttctgtatctaccaacctccagagaggcaacagacaagcagctaccgcagatgtcaacacacaaggcgttcttccaggcatggtctggcaggacagagatgtgtaccttcaggggcccatctgggcaaagattccacacacggacggacattttcacccctctcccctcatgggtggattcggacttaaacaccctcctccacagattctcatcaagaacaccccggtacctgcgaatccttcgaccaccttcagtgcggcaaagtttgcttccttcatcacacagtactccacgggacaggtcagcgtggagatcgagtgggagctgcagaaggaaaacagcaaacgctggaatcccgaaattcagtacacttccaactacaacaagtctgttaatgtggactttactgtggacactaatggcgtgtattcagagcctcgccccattggcaccagatacctgactcgtaatctgtaa

SEQ ID NO: 4281 - DNA, 2208 bp, synthetic construct
  misc_feature 1..2208: note = source = /note="Description of Artificial Sequence: Synthetic polynucleotide"
  source 1..2208: mol_type = other DNA
atggctgccgatggttatcttccagattggctcgaggacactctctctgaaggaataagacagtggtggaagctcaaacctggcccaccaccaccaaagcccgcagagcggcataaggacgacagcaggggtcttgtgcttcctgggtacaagtacctcggacccttcaacggactcgacaagggagagccggtcaacgaggcagacgccgcggccctcgagcacgacaaagcctacgaccggcagctcgacagcggagacaacccgtacctcaagtacaaccacgccgacgcggagtttcaggagcgccttaaagaagatacgtcttttgggggcaacctcggacgagcagtcttccaggcgaaaaagagggttcttgaacctctgggcctggttgaggaacctgttaagacggctccgggaaaaaagaggccggtagagcactctcctgtggagccagactcctcctcgggaaccggaaaggcgggccagcagcctgcaagaaaaagattgaattttggtcagactggagacgcagactcagtacctgacccccagcctctcggacagccaccagcagccccctctggtctgggaactaatacgatggctacaggcagtggcgcaccaatggcagacaataacgagggcgccgacggagtgggtaattcctcgggaaattggcattgcgattccacatggatgggcgacagagtcatcaccaccagcacccgaacctgggccctgcccacctacaacaaccacctctacaaacaaatttccagccaatcaggagcctcgaacgacaatcactactttggctacagcaccccttgggggtattttgacttcaacagattccactgccacttttcaccacgtgactggcaaagactcatcaacaacaactggggattccgacccaagagactcaacttcaagctctttaacattcaagtcaaagaggtcacgcagaatgacggtacgacgacgattgccaataaccttaccagcacggttcaggtgtttactgactcggagtaccagctcccgtacgtcctcggctcggcgcatcaaggatgcctcccgccgttcccagcagacgtcttcatggtgccacagtatggatacctcaccctgaacaacgggagtcaggcagtaggacgctcttcattttactgcctggagtactttccttctcagatgctgcgtaccggaaacaactttaccttcagctacacttttgaggacgttcctttccacagcagctacgctcacagccagagtctggaccgtctcatgaatcctctcatcgaccagtacctgtattacttgagcagaacaaacactccaagtggaaccaccacgcagtcaaggcttcagttttctcaggccggagcgagtgacattcgggaccagtctaggaactggcttcctggaccctgttaccgccagcagcgagtatcaaagacatctgcggataacaacaacagtgaatactcgtggactggagttaccaagtaccacctcaatggcagagactctctggtgaatccgggcccggccatggcaagccacaaggacgatgaagaaaagttttttcctcagagcggggttctcatctttgggaagcaaggctcagagaaaacaaatgtggacattgaaaaggtcatgattacagacgaagaggaaatcaggacaaccaatcccgtggctacggagcagtatggttctgtatctaccaacctccagagaggcaacagacaagcagctaccgcagatgtcaacacacaaggcgttcttccaggcatggtctggcaggacagagatgtgtaccttcaggggcccatctgggcaaagattccacacacggacggacattttcacccctctcccctcatgggtggattcggacttaaacaccctcctccacagattctcatcaagaacaccccggtacctgcgaatccttcgaccaccttcagtgcggcaaagtttgcttccttcatcacacagtactccacgggacaggtcagcgtggagatcgagtgggagctgcagaaggaaaacagcaaacgctggaatcccgaaattcagtacacttccaactacaacaagtctgttaatgtggactttactgtggacactaatggcgtgtattcagagcctcgccccattggcaccagatacctgactcgtaatctgtaa

SEQ ID NO: 4282 - DNA, 2208 bp, synthetic construct
  misc_feature 1..2208: note = source = /note="Description of Artificial Sequence: Synthetic polynucleotide"
  source 1..2208: mol_type = other DNA
atggctgccgatggttatcttccagattggctcgaggacactctctctgaaggaataagacagtggtggaagctcaaacctggcccaccaccaccaaagcccgcagagcggcataaggacgacagcaggggtcttgtgcttcctgggtacaagtacctcggacccttcaacggactcgacaagggagagccggtcaacgaggcagacgccgcggccctcgagcacgacaaagcctacgaccggcagctcgacagcggagacaacccgtaccccaagtacaaccacgccgacgcggagtttcaggagcgccttaaagaagatacgtcttttgggggcaacctcggacgagcagtcttccaggcgaaaaagagggttcttgaacctctgggcctggttgaggaacctgttaagacggctccgggaaaaaagaggccggtagagcactctcctgtggagccagactcctcctcgggaaccggaaaggcgggccagcagcctgcaagaaaaagattgaattttggtcagactggagacgcagactcagtacctgacccccagcctctcggacagccaccagcagccccctctggtctgggaactaatacgatggctacaggcagtggcgcaccaatggcagacaataacgagggcgccgacggagtgggtaattcctcgggaaattggcattgcgattccacatggatgggcgacagagtcatcaccaccagcacccgaacctgggccctgcccacctacaacaaccacctctacaaacaaatttccagccaatcaggagcctcgaacgacaatcactactttggctacagcaccccttgggggtattttgacttcaacagattccactgccacttttcaccacgtgactggcaaagactcatcaacaacaactggggattccgacccaagagactcaacttcaagctctttaacattcaagtcaaagaggtcacgcagaatgacggtacgacgacgattgccaataaccttaccagcacggttcaggtgtttactgactcggagtaccagctcccgtacgtcctcggctcggcgcatcaaggatgcctcccgccgttcccagcagacgtcttcatggtgccacagtatggatacctcaccctgaacaacgggagtcaggcagtaggacgctcttcattttactgcctggagtactttccttctcagatgctgcgtaccggaaacaactttaccttcagctacacttttgaggacgttcctttccacagcagctacgctcacagccagagtctggaccgtctcatgaatcctctcatcgaccagtacctgtattacttgagcagaacaaacactccaagtggaaccaccacgcagtcaaggcttcagttttctcaggccggagcgagtgacattcgggaccagtctaggaactggcttcctggaccctgttaccgccagcagcgagtatcaaagacatctgcggataacaacaacagtgaatactcgtggactggagctaccaagtaccacctcaatggcagagactctctggtgaatccgggcccggccatggcaagccacaaggacgatgaagaaaagttttttcctcagagcggggttctcatctttgggaagcaaggctcagagaaaacaaatgtggacattgaaaaggtcatgattacagacgaagaggaaatcaggacaaccaatcccgtggctacggagcagtatggttctgtatctaccaacctccagagaggcaacagacaagcagctaccgcagatgtcaacacacaaggcgttcttccaggcatggtctggcaggacagagatgtgtaccttcaggggcccatctgggcaaagattccacacacggacggacattttcacccctctcccctcatgggtggattcggacttaaacaccctcctccacagattctcatcaagaacaccccggtacctgcgaatccttcgaccaccttcagtgcggcaaagtttgcttccttcatcacacagtactccacgggacaggtcagcgtggagatcgagtgggagctgcagaaggaaaacagcaaacgctggaatcccgaaattcagtacacttccaactacaacaagtctgttaatgtggactttactgtggacactaatggcgtgtattcagagcctcgccccattggcaccagatacctgactcgtaatctgtaa

SEQ ID NO: 4283 - DNA, 2208 bp, synthetic construct
  misc_feature 1..2208: note = source = /note="Description of Artificial Sequence: Synthetic polynucleotide"
  source 1..2208: mol_type = other DNA
atggctgccgatggttatcttccagattggctcgaggacactctctctgaaggaataagacagtggtggaagctcaaacctggcccaccaccaccaaagcccgcagagcggcataaggacgacagcaggggtcttgtgcttcctgggtacaagtacctcggacccttcaacggactcgacaagggagagccggtcaacgaggcagacgccgcggccctcgagcacgacaaagcctacgaccggcagctcgacagcggagacaacccgtacctcaagtacaaccacgccgacgcggagtttcaggagcgccttaaagaagatacgtcttttgggggcaacctcggacgagcagtcttccaggcgaaaaagagggttcttgaacctctgggcctggttgaggaacctgttaagacggctccgggaaaaaagaggccggtagagcactctcctgtggagccagactcctcctcgggaaccggaaaggcgggccagcagcctgcaagaaaaagattgaattttggtcagactggagacgcagactcagtacctgacccccagcctctcggacagccaccagcagccccctctggtctgggaactaatacgatggctacaggcagtggcgcaccaatggcagacaataacgagggcgccgacggagtgggtaattcctcgggaaattggcattgcgattccacatggatgggcgacagagtcatcaccaccagcacccgaacctgggccctgcccacctacaacaaccacctctacaaacaaatttccagccaatcaggagcctcgaacgacaatcactactttggctacagcaccccttgggggtattttgacttcaacagattccactgccacttttcaccacgtgactggcaaagactcatcaacaacaactggggattccgacccaagagactcaacttcaagctctttaacattcaagtcaaagaggtcacgcagaatgacggtacgacgacgattgccaataaccttaccagcacggttcaggtgtttactgactcggagtaccagctcccgtacgtcctcggctcggcgcatcaaggatgcctcccgccgttcccagcagacgtcttcatggtgccacagtatggatacctcaccctgaacaacgggagtcaggcagtaggacgctcttcattttactgcctggagtactttccttctcagatgctgcgtaccggaaacaactttaccttcagctacacttttgaggacgttcctttccacagcagctacgctcacagccagagtctggaccgtctcatgaatcctctcatcgaccagtacctgtattacttgagcagaacaaacactccaagtggaaccaccacgcagtcaaggcttcagttttctcaggccggagcgagtgacattcgggaccagtctaggaactggcttcctggaccctgttaccgccagcagcgagtatcaaagacatctgcggataacaacaacagtgaatactcgtggactggagctaccaagtaccacctcaatggcagagactctctggtgaatccgggcccggccatggcaagccacaaggacgatgaagaaaagttttttcctcagagcggggttcccatctttgggaagcaaggctcagagaaaacaaatgtggacattgaaaaggtcatgattacagacgaagaggaaatcaggacaaccaatcccgtggctacggagcagtatggttctgtatctaccaacctccagagaggcaacagacaagcagctaccgcagatgtcaacacacaaggcgttcttccaggcatggtctggcaggacagagatgtgtaccttcaggggcccatctgggcaaagattccacacacggacggacattttcacccctctcccctcatgggtggattcggacttaaacaccctcctccacagattctcatcaagaacaccccggtacctgcgaatccttcgaccaccttcagtgcggcaaagtttgcttccttcatcacacagtactccacgggacaggtcagcgtggagatcgagtgggagctgcagaaggaaaacagcaaacgctggaatcccgaaattcagtacacttccaactacaacaagtctgttaatgtggactttactgtggacactaatggcgtgtattcagagcctcgccccattggcaccagatacctgactcgtaatctgtaa

SEQ ID NO: 4284 - DNA, 2208 bp, synthetic construct
  misc_feature 1..2208: note = source = /note="Description of Artificial Sequence: Synthetic polynucleotide"
  source 1..2208: mol_type = other DNA
atggctgccgatggttatcttccagattggctcgaggacactctctctgaaggaataagacagtggtggaagctcaaacctggcccaccaccaccaaagcccgcagagcggcataaggacgacagcaggggtcttgtgcttcctgggtacaagtacctcggacccttcaacggactcgacaagggagagccggtcaacgaggcagacgccgcggccctcgagcacgacaaagcctacgaccggcagctcgacagcggagacaacccgtacctcaagtacaaccacgccgacgcggagtttcaggagcgccttaaagaagatacgtcttttgggggcaacctcggacgagcagtcttccaggcgaaaaagagggttcttgaacctctgggcctggttgaggaacctgttaagacggctccgggaaaaaagaggccggtagagcactctcctgtggagccagactcctcctcgggaaccggaaaggcgggccagcagcctgcaagaaaaagattgaattttggtcagactggagacgcagactcagtacctgacccccagcctctcggacagccaccagcagccccccctggtctgggaactaatacgatggctacaggcagtggcgcaccaatggcagacaataacgagggcgccgacggagtgggtaattcctcgggaaattggcattgcgattccacatggatgggcgacagagtcatcaccaccagcacccgaacctgggccctgcccacctacaacaaccacctctacaaacaaatttccagccaatcaggagcctcgaacgacaatcactactttggctacagcaccccttgggggtattttgacttcaacagattccactgccacttttcaccacgtgactggcaaagactcatcaacaacaactggggattccgacccaagagactcaacttcaagctctttaacattcaagtcaaagaggtcacgcagaatgacggtacgacgacgattgccaataaccttaccagcacggttcaggtgtttactgactcggagtaccagctcccgtacgtcctcggctcggcgcatcaaggatgcctcccgccgttcccagcagacgtcttcatggtgccacagtatggatacctcaccctgaacaacgggagtcaggcagtaggacgctcttcattttactgcctggagtactttccttctcagatgctgcgtaccggaaacaactttaccttcagctacacttttgaggacgttcctttccacagcagctacgctcacagccagagtctggaccgtctcatgaatcctctcatcgaccagtacctgtattacttgagcagaacaaacactccaagtggaaccaccacgcagtcaaggcttcagttttctcaggccggagcgagtgacattcgggaccagtctaggaactggcttcctggaccctgttaccgccagcagcgagtatcaaagacatctgcggataacaacaacagtgaatactcgtggactggagctaccaagtaccacctcaatggcagagactctctggtgaatccgggcccggccatggcaagccacaaggacgatgaagaaaagttttttcctcagagcggggttctcatctttgggaagcaaggctcagagaaaacaaatgtggacattgaaaaggtcatgattacagacgaagaggaaatcaggacaaccaatcccgtggctacggagcagtatggttctgtatctaccaacctccagagaggcaacagacaagcagctaccgcagatgtcaacacacaaggcgttcttccaggcatggtctggcaggacagagatgtgtaccttcaggggcccatctgggcaaagattccacacacggacggacattttcacccctctcccctcatgggtggattcggacttaaacaccctcctccacagattctcatcaagaacaccccggtacctgcgaatccttcgaccaccttcagtgcggcaaagtttgcttccttcatcacacagtactccacgggacaggtcagcgtggagatcgagtgggagctgcagaaggaaaacagcaaacgctggaatcccgaaattcagtacacttccaactacaacaagtctgttaatgtggactttactgtggacactaatggcgtgtattcagagcctcgccccattggcaccagatacctgactcgtaatctgtaa

SEQ ID NO: 4285 - DNA, 2208 bp, synthetic construct
  misc_feature 1..2208: note = source = /note="Description of Artificial Sequence: Synthetic polynucleotide"
  source 1..2208: mol_type = other DNA
atggctgccgatggttatcttccagattggctcgaggacactctctctgaaggaataagacagtggtggaagctcaaacctggcccaccaccaccaaagcccgcagagcggcataaggacgacagcaggggtcttgtgcttcctgggtacaagtacctcggacccttcaacggactcgacaagggagagccggtcaacgaggcagacgccgcggccctcgagcacgacaaagcctacgaccggcagctcgacagcggagacaacccgtacctcaagtacaaccacgccgacgcggagtttcaggagcgccttaaagaagatacgtcttttgggggcaacctcggacgagcagtcttccaggcgaaaaagagggttcttgaacctctgggcctggttgaggaacctgttaagacggctccgggaaaaaagaggccggtagagcactctcctgtggagccagactcctcctcgggaaccggaaaggcgggccagcagcctgcaagaaaaagattgaattttggtcagactggagacgcagactcagtacctgacccccagcctctcggacagccaccagcagccccctctggtctgggaactaatacgatggctacaggcagtggcgcaccaatggcagacaataacgagggcgccgacggagtgggtaattcctcgggaaattggcattgcgattccacatggatgggcgacagagtcatcaccaccagcacccgaacctgggccctgcccacctacaacaaccacctctacaaacaaatttccagccaatcaggagcctcgaacgacaatcactactttggctacagcaccccttgggggtattttgacttcaacagattccactgccacttttcaccacgtgactggcaaagactcatcaacaacaactggggattccgacccaagagactcaacttcaagctctttaacattcaagtcaaagaggtcacgcagaatgacggtacgacgacgattgccaataaccttaccagcacggttcaggtgtttactgactcggagtaccagctcccgtacgtcctcggctcggcgcatcaaggatgcctcccgccgttcccagcagacgtcttcatggtgccacagtatggatacctcaccctgaacaacgggagtcaggcagtaggacgctcttcattttactgcctggagtactttccttctcagatgctgcgtaccggaaacaactttaccttcagctacacttttgaggacgttcctttccacagcagctacgctcacagccagagtctggaccgtctcatgaatcctctcatcgaccagtacctgtattacttgagcagaacaaacactccaagtggaaccaccacgcagtcaaggcttcagttttctcaggccggagcgagtgacattcgggaccagtctaggaactggcttcctggaccctgttaccgccagcagcgagtatcaaagacatctgcggataacaacaacagtgaatactcgtggactggagctaccaagtaccacctcaatggcagagactctctggtgaatccgggcccggccatggcaagccacaaggacgatgaagaaaagttttttcctcagagcgggattctcatctttgggaagcaaggctcagagaaaacaaatgtggacattgaaaaggtcatgattacagacgaagaggaaatcaggacaaccaatcccgtggctacggagcagtatggttctgtatctaccaacctccagagaggcaacagacaagcagctaccgcagatgtcaacacacaaggcgttcttccaggcatggtctggcaggacagagatgtgtaccttcaggggcccatctgggcaaagattccacacacggacggacattttcacccctctcccctcatgggtggattcggacttaaacaccctcctccacagattctcatcaagaacaccccggtacctgcgaatccttcgaccaccttcagtgcggcaaagtttgcttccttcatcacacagtactccacgggacaggtcagcgtggagatcgagtgggagctgcagaaggaaaacagcaaacgctggaatcccgaaattcagtacacttccaactacaacaagtctgttaatgtggactttactgtggacactaatggcgtgtattcagagcctcgccccattggcaccagatacctgactcgtaatctgtaa

SEQ ID NO: 4286 - DNA, 2208 bp, synthetic construct
  misc_feature 1..2208: note = source = /note="Description of Artificial Sequence: Synthetic polynucleotide"
  source 1..2208: mol_type = other DNA
atggctgccgatggttatcttccagattggctcgaggacactctctctgaaggaataagacagtggtggaagctcaaacctggcccaccaccaccaaagcccgcagagcggcataaggacgacagcaggggtcttgtgcttcctgggtacaagtacctcggacccttcaacggactcgacaagggagagccggtcaacgaggcagacgccgcggccctcgagcacgacaaagcctacgaccggcagctcgacagcggagacaacccgtacctcaagtacaaccacgccgacgcggagtttcaggagcgccttaaagaagatacgtcttttgggggcaacctcggacgagcagtcttccaggcgaaaaagagggttcttgaacctctgggcctggttgaggaacctgttaagacggctccgggaaaaaagaggccggtagagcactctcctgtggagccagactcctcctcgggaaccggaaaggcgggccagcagcctgcaagaaaaagattgaattttggtcagactggagacgcagactcagtacctgacccccagcctctcggacagccaccagcagccccctctggtctgggaactaatacgatggctacaggcagtggcgcaccaatggcagacaataacgagggcgccgacggagtgggtaattcctcgggaaattggcattgcgattccacatggatgggcgacagagtcatcaccaccagcacccgaacctgggccctgcccacctacaacaaccacctctacaaacaaatttccagccaatcaggagcctcgaacgacaatcactactttggctacagcaccccttgggggtattttgacttcaacagattccactgccacttttcaccacgtgactggcaaagactcatcaacaacaactggggattccgacccaagagactcaacttcaagctctttaacattcaagtcaaagaggtcacgcagaatgacggtacgacgacgattgccaataaccttaccagcacggttcaggtgtttactgactcggagtaccagctcccgtacgtcctcggctcggcgcatcaaggatgcctcccgccgttcccagcagacgtcttcatggtgccacagtatggatacctcaccctgaacaacgggagtcaggcagtaggacgctcttcattttactgcctggagtactttccttctcagatgctgcgtaccggaaacaactttaccttcagctacacttttgaggacgttcctttccacagcagctacgctcacagccagagtctggaccgtctcatgaatcctctcatcgaccagtacctgtattacttgagcagaacaaacactccaagtggaaccaccacgcagtcaaggcttcagttttctcaggccggagcgagtgacattcgggaccagtctaggaactggcttcctggaccctgttaccgccagcagcgagtatcaaagacatctgcggataacaacaacagtgaatactcgtggactggagctaccaagtaccacctcaatggcagagactctctggtgaatccgggcccggccatggcaagccacaaggacgatgaagaaaagttttttcctcagagcggggttctcatctttgggaagcaaggctcagagaaaacaaatgtggacattgaaaaggtcatgattacagacgaagaggaaatcaggacaaccaatcccgtggctacggagcagtatggttctgtatctaccaacctccagagaggcaacagacaagcagctaccgcagatgtcaacacacaaggcgttcttccaggcatggtctggcaggacagagatgtgtaccttcaggggcccatctgggcaaagattccacacacggacggacattttcacccctctcccctcatgggtggattcggacttaaacaccctcctccacagattctcatcaagaacaccccggtacctgcgaatccttcgaccaccttcagtgcggcaaagtttgcttccttcatcacacagtactccacgggacaggtcagcgtggagatcgagtgggagctgcagaaggaaaacagcaaacgctggaatcccgaaattcagtgcacttccaactacaacaagtctgttaatgtggactttactgtggacactaatggcgtgtattcagagcctcgccccattggcaccagatacctgactcgtaatctgtaa

SEQ ID NO: 4287 - DNA, 2208 bp, synthetic construct
  misc_feature 1..2208: note = source = /note="Description of Artificial Sequence: Synthetic polynucleotide"
  source 1..2208: mol_type = other DNA
atggctgccgatggttatcttccagattggctcgaggacactctctctgaaggaataagacagtggtggaagctcaaacctggcccaccaccaccaaagcccgcagagcggcataaggacgacagcaggggtcttgtgcttcctgggtacaagtacctcggacccttcaacggactcgacaagggagagccggtcaacgaggcagacgccgcggccctcgagcacgacaaagcctacgaccggcagctcgacagcggagacaacccgtacctcaagtacaaccacgccgacgcggagtttcaggagcgccttaaagaagatacgtcttttgggggcaacctcggacgagcagtcttccaggcgaaaaagagggttcttgaacctctgggcctggttgaggaacctgttaagacggctccgggaaaaaagaggccggtagagcactctcctgtggagccagactcctcctcgggaaccggaaaggcgggccagcagcctgcaagaaaaagattgaattttggtcagactggagacgcagactcagtacctgacccccagcctctcggacagccaccagcagccccctctggtctgggaactaatacgatggctacaggcagtggcgcaccaatggcagacaataacgagggcgccgacggagtgggtaattcctcgggaaattggcattgcgattccacatggatgggcgacagagtcatcaccaccagcacccgaacctgggccctgcccacctacaacaaccacctctacaaacaaatttccagccaatcaggagcctcgaacgacaatcactactttggctacagcaccccttgggggtattttgacttcaacagattccactgccacttttcaccacgcgactggcaaagactcatcaacaacaactggggattccgacccaagagactcaacttcaagctctttaacattcaagtcaaagaggtcacgcagaatgacggtacgacgacgattgccaataaccttaccagcacggttcaggtgtttactgactcggagtaccagctcccgtacgtcctcggctcggcgcatcaaggatgcctcccgccgttcccagcagacgtcttcatggtgccacagtatggatacctcaccctgaacaacgggagtcaggcagtaggacgctcttcattttactgcctggagtactttccttctcagatgctgcgtaccggaaacaactttaccttcagctacacttttgaggacgttcctttccacagcagctacgctcacagccagagtctggaccgtctcatgaatcctctcatcgaccagtacctgtattacttgagcagaacaaacactccaagtggaaccaccacgcagtcaaggcttcagttttctcaggccggagcgagtgacattcgggaccagtctaggaactggcttcctggaccctgttaccgccagcagcgagtatcaaagacatctgcggataacaacaacagtgaatactcgtggactggagctaccaagtaccacctcaatggcagagactctctggtgaatccgggcccggccatggcaagccacaaggacgatgaagaaaagttttttcctcagagcggggttctcatctttgggaagcaaggctcagagaaaacaaatgtggacattgaaaaggtcatgattacagacgaagaggaaatcaggacaaccaatcccgtggctacggagcagtatggttctgtatctaccaacctccagagaggcaacagacaagcagctaccgcagatgtcaacacacaaggcgttcttccaggcatggtctggcaggacagagatgtgtaccttcaggggcccatctgggcaaagattccacacacggacggacattttcacccctctcccctcatgggtggattcggacttaaacaccctcctccacagattctcatcaagaacaccccggtacctgcgaatccttcgaccaccttcagtgcggcaaagtttgcttccttcatcacacggtactccacgggacaggtcagcgtggagatcgagtgggagctgcagaaggaaaacagcaaacgctggaatcccgaaattcagtacacttccaactacaacaagtctgttaatgtggactttactgtggacactaatggcgtgtattcagagcctcgccccattggcaccagatacctgactcgtaatctgtaa

SEQ ID NO: 4288 - DNA, 2208 bp, synthetic construct
  misc_feature 1..2208: note = source = /note="Description of Artificial Sequence: Synthetic polynucleotide"
  source 1..2208: mol_type = other DNA
atggctgccgatggttatcttccagattggctcgaggacactctctctgaaggaataagacagtggtggaagctcaaacctggcccaccaccaccaaagcccgcagagcggcataaggacgacagcaggggtcttgtgcttcctgggtacaagtacctcggacccttcaacggactcgacaagggagagccggtcaacgaggcagacgccgcggccctcgagcacgacaaagcctacgaccggcagctcgacagcggagacaacccgtacctcaagtacaaccacgccgacgcggagtttcgggagcgccttaaagaagatacgtcttttgggggcaacctcggacgagcagtcttccaggcgaaaaagagggttcttgaacctctgggcctggttgaggaacctgttaagacggctccgggaaaaaagaggccggtagagcactctcctgtggagccagactcctcctcgggaaccggaaaggcgggccagcagcctgcaagaaaaagattgaattttggtcagactggagacgcagactcagtacctgacccccagcctctcggacagccaccagcagccccctctggtctgggaactaatacgatggctacaggcagtggcgcaccaatggcagacaataacgagggcgccgacggagtgggtaattcctcgggaaattggcattgcgattccacatggatgggcgacagagtcatcaccaccagcacccgaacctgggccctgcccacctacaacaaccacctctacaaacaaatttccagccaatcaggagcctcgaacgacaatcactactttggctacagcaccccttgggggtattttgacttcaacagattccactgccacttttcaccacgtgactggcaaagactcatcaacaacaactggggattccgacccaagagactcaacttcaagctctttaacattcaagtcaaagaggtcacgcagaatgacggtacgacgacgattgccaataaccttaccagcacggttcaggtgtttactgactcggagtaccagctcccgtacgtcctcggctcggcgcatcaaggatgcctcccgccgttcccagcagacgtcttcatggtgccacagtatggatacctcaccctgaacaacgggagtcaggcagtaggacgctcttcattttactgcctggagtactttccttctcagatgctgcgtaccggaaacaactttaccttcagctacacttttgaggacgttcctttccacagcagctacgctcacagccagagtctggaccgtctcatgaatcctctcatcgaccagtacctgtattacttgagcagaacaaacactccaagtggaaccaccacgcagtcaaggcttcagttttctcaggccggagcgagtgacattcgggaccagtctaggaactggcttcctggaccctgttaccgccagcagcgagtatcaaagacatctgcggataacaacaacagtgaatactcgtggactggagctaccaagtaccacctcaatggcagagactctctggtgaatccgggcccggccatggcaagccacaaggacgatgaagaaaagttttttcctcagagcggggttctcatctttgggaagcaaggctcagagaaaacaaatgtggacattgaaaaggtcatgattacagacgaagaggaaatcaggacaaccaatcccgtggctacggagcagtatggttctgtatctaccaacctccagagaggcaacagacaagcagctaccgcagatgtcaacacacaaggcgttcttccaggcatggtctggcaggacagagatgtgtaccttcaggggcccatctgggcaaagattccacacacggacggacattttcacccctctcccctcatgggtggattcggacttaaacaccctcctccacagattctcatcaagaacaccccggtacctgcgaatccttcgaccaccttcagtgcggcaaagtttgcttccttcatcacacagtactccacgggacaggtcagcgtggagatcgagtgggagctgcagaaggaaaacagcaaacgctggaatcccgaaattcagtacacttccaactacaacaagtctgttaatgtggactttactgtggacactaatggcgtgtattcagagcctcgccccattggcaccagatacctgactcgtaatctgtaa

SEQ ID NO: 4289 - DNA, 2208 bp, synthetic construct
  misc_feature 1..2208: note = source = /note="Description of Artificial Sequence: Synthetic polynucleotide"
  source 1..2208: mol_type = other DNA
atggctgccgatggttatcttccagattggctcgaggacactctctctgaaggaataagacagtggtggaagctcaaacctggcccaccaccaccaaagcccgcagagcggcataaggacgacagcaggggtcttgtgcttcctgggtacaagtacctcggacccttcaacggactcgacaagggagagccggtcaacgaggcagacgccgcggccctcgagcacgacaaagcctacgaccggcagctcgacagcggagacaacccgtacctcaagcacaaccacgccgacgcggagtttcaggagcgccttaaagaagatacgtcttttgggggcaacctcggacgagcagtcttccaggcgaaaaagagggttcttgaacctctgggcctggttgaggaacctgttaagacggctccgggaaaaaagaggccggtagagcactctcctgtggagccagactcctcctcgggaaccggaaaggcgggccagcagcctgcaagaaaaagattgaattttggtcagactggagacgcagactcagtacctgacccccagcctctcggacagccaccagcagccccctctggtctgggaactaatacgatggctacaggcagtggcgcaccaatggcagacaataacgagggcgccgacggagtgggtaattcctcgggaaattggcattgcgattccacatggatgggcgacagagtcatcaccaccagcacccgaacctgggccctgcccacctacaacaaccacctctacaaacaaatttccagccaatcaggagcctcgaacgacaatcactactttggctacagcaccccttgggggtattttgacttcaacagattccactgccacttttcaccacgtgactggcaaagactcatcaacaacaactggggattccgacccaagagactcaacttcaagctctttaacattcaagtcaaagaggtcacgcagaatgacggtacgacgacgattgccaataaccttaccagcacggttcaggtgtttactgactcggagtaccagctcccgtacgtcctcggctcggcgcatcaaggatgcctcccgccgttcccagcagacgtcttcatggtgccacagtatggatacctcaccctgaacaacgggagtcaggcagtaggacgctcttcattttactgcctggagtactttccttctcagatgctgcgtaccggaaacaactttaccttcagctacacttttgaggacgttcctttccacagcagctacgctcacagccagagtctggaccgtctcatgaatcctctcatcgaccagtacctgtattacttgagcagaacaaacactccaagtggaaccaccacgcagtcaaggcttcagttttctcaggccggagcgagtgacattcgggaccagtctaggaactggcttcctggaccctgttaccgccagcagcgagtatcaaagacatctgcggataacaacaacagtgaatactcgtggactggagctaccaagtaccacctcaatggcagagactctctggtgaatccgggcccggccatggcaagccacaaggacgatgaagaaaagttttttcctcagagcggggttctcatctttgggaagcaaggctcagagaaaacaaatgtggacattgaaaaggtcatgattacagacgaagaggaaatcaggacaaccaatcccgtggctacggagcagtatggttctgtatctaccaacctccagagaggcaacagacaagcagctaccgcagatgtcaacacacaaggcgttcttccaggcatggtctggcaggacagagatgtgtaccttcaggggcccatctgggcaaagattccacacacggacggacattttcacccctctcccctcatgggtggattcggacttaaacaccctcctccacagattctcatcaagaacaccccggtacctgcgaatccttcgaccaccttcagtgcggcaaagtttgcttccttcatcacacagtactccacgggacaggtcagcgtggagatcgagtgggagctgcagaaggaaaacagcaaacgctggaatcccgaaattcagtacacttccaactacaacaagtctgttaatgtggactttactgtggacactaatggcgtgtattcagagcctcgccccattggcaccagatacctgactcgtaatctgtaa

SEQ ID NO: 4290 - DNA, 2208 bp, synthetic construct
  misc_feature 1..2208: note = source = /note="Description of Artificial Sequence: Synthetic polynucleotide"
  source 1..2208: mol_type = other DNA
atggctgccgatggttatcttccagattggctcgaggacactctctctgaaggaataagacagtggtggaagctcaaacctggcccaccaccaccaaagcccgcagagcggcataaggacgacagcaggggtcttgtgcttcctgggtacaagtacctcggacccttcaacggactcgacaagggagagccggtcaacgaggcagacgccgcggccctcgagcacgacaaagcctacgaccggcagctcgacagcggagacaacccgtacctcaagtacaaccacgccgacgcggagtttcaggagcgccttaaagaagatacgtcttttgggggcaacctcggacgagcagtcttccaggcgaaaaagagggttcttgaacctctgggcctggttgaggaacctgttaagacggctccgggaaaaaagaggccggtagagcactctcctgtggagccagactcctcctcgggaaccggaaaggcgggccagcagcctgcaagaaaaagattgaattttggtcagactggagacgcagactcagtacctgacccccagcctctcggacagccaccagcagccccctctggtctgggaactaatacgatggctacaggcagtggcgcaccaatggcagacaataacgagggcgccgacggagtgggtaattcctcgggaaattggcattgcgattccacatggatgggcgacagagtcatcaccaccagcacccgaacctgggccctgcccacctacaacaaccacctctacaaacaaatttccagccaatcaggagcctcgaacgacaatcactactttggctacagcaccccttgggggtattttgacttcaacagattccactgccacttttcaccacgtgactggcaaagactcatcaacaacaactggggattccgacccaagagactcaacttcaagctctttaacattcaagtcaaagaggtcacgcagaatgacggtacgacgacgattgccaataaccttaccagcacggttcaggtgtttactgactcggagtaccagctcccgtacgtcctcggctcggcgcatcaaggatgcctcccgccgttcccagcagacgtcttcatggtgccacagtatggatacctcaccctgaacaacgggagtcgggcagtaggacgctcttcattttactgcctggagtactttccttctcagatgctgcgtaccggaaacaactttaccttcagctacacttttgaggacgttcctttccacagcagctacgctcacagccagagtctggaccgtctcatgaatcctctcatcgaccagtacctgtattacttgagcagaacaaacactccaagtggaaccaccacgcagtcaaggcttcagttttctcaggccggagcgagtgacattcgggaccagtctaggaactggcttcctggaccctgttaccgccagcagcgagtatcaaagacatctgcggataacaacaacagtgaatactcgtggactggagctaccaagtaccacctcaatggcagagactctctggtgaatccgggcccggccatggcaagccacaaggacgatgaagaaaagttttttcctcagagcggggttctcatctttgggaagcaaggctcagagaaaacaaatgtggacattgaaaaggtcatgattacagacgaagaggaaatcaggacaaccaatcccgtggctacggagcagtatggttctgtatctaccaacctccagagaggcaacagacaagcagctaccgcagatgtcaacacacaaggcgttcttccaggcatggtctggcaggacagagatgtgtaccttcaggggcccatctgggcaaagattccacacacggacggacattttcacccctctcccctcatgggtggattcggacttaaacaccctcctccacagattctcatcaagaacaccccggtacctgcgaatccttcgaccaccttcagtgcggcaaagtttgcttccttcatcacacagtactccacgggacaggtcagcgtggagatcgagtgggagctgcagaaggaaaacagcaaacgctggaatcccgaaattcagtacacttccaactacaacaagtctgttaatgtggactttactgtggacactaatggcgtgtattcagagcctcgccccattggcaccagatacctgactcgtaatctgtaa

SEQ ID NO: 4291 - DNA, 2208 bp, synthetic construct
  misc_feature 1..2208: note = source = /note="Description of Artificial Sequence: Synthetic polynucleotide"
  source 1..2208: mol_type = other DNA
atggctgccgatggttatcttccagattggctcgaggacactctctctgaaggaataagacagtggtggaagctcaaacctggcccaccaccaccaaagcccgcagagcggcataaggacgacagcaggggtcttgtgcttcctgggtacaagtacctcggacccttcaacggactcgacaagggagagccggtcaacgaggcagacgccgcggccctcgagcacgacaaagcctacgaccggcagctcgacagcggagacaacccgtacctcaagtacaaccacgccgacgcggagtttcaggagcgccttaaagaagatacgtcttttgggggcaacctcggacgagcagtcttccaggcgaaaaagagggttcttgaacctctgggcctggttgaggaacctgttaagacggctccgggaaaaaagaggccggtagagcactctcctgtggagccagactcctcctcgggaaccggaaaggcgggccagcagcctgcaagaaaaagattgaattttggtcagactggagacgcagactcagtacctgacccccagcctctcggacagccaccagcagccccctctggtctgggaactaatacgatggctacaggcagtggcgcaccaatggcagacaataacgagggcgccgacggagtgggtaattcctcgggaaattggcattgcgattccacatggatgggcgacagagtcatcaccaccagcacccgaacctgggccctgcccacctacaacaaccacctctacaaacaaatttccagccaatcaggagcctcgaacgacaatcactactttggctacagcaccccttgggggtattttgacttcaacagattccactgccacttttcaccacgtgactggcaaagactcatcaacaacaactggggattccgacccaagagactcaacttcaagctctttaacattcaagtcaaagaggtcacgcagaatgacggtacgacgacgattgccaataaccttaccagcacggttcaggtgtttactgactcggagtaccagctcccgtacgtcctcggctcggcgcatcaaggatgcctcccgccgttcccagcagacgtcttcatggtgccacagtatggatacctcaccctgaacaacgggagtcaggcagtaggacgctcttcattttactgcctggagtactttccttctcagatgctgcgtaccggaaacaactttaccttcagctacacttttgaggacgttcctttccacagcagctacgctcacagccagagtctggaccgtctcatgaatcctctcatcgaccagtacctgtattacttgagcagaacaaacactccaagtggaaccaccacgcagtcaaggcttcagttttctcaggccggagcgagtgacattcgggaccagtctaggaactggcttcctggaccctgttaccgccagcagcgagtatcaaagacatctgcggataacaacaacagtgaatactcgtggactggagctaccaagtaccacctcaatggcagagactctctggtgaatccgggcccggccatggcaagccacaaggacgatgaagaaaagttttttcctcagagcggggttctcatctttgggaagcaaggctcagagaaaacaaatgtggacattgaaaaggtcgtgattacagacgaagaggaaatcaggacaaccaatcccgtggctacggagcagtatggttctgtatctaccaacctccagagaggcaacagacaagcagctaccgcagatgtcaacacacaaggcgttcttccaggcatggtctggcaggacagagatgtgtaccttcaggggcccatctgggcaaagattccacacacggacggacattttcacccctctcccctcatgggtggattcggacttaaacaccctcctccacagattctcatcaagaacaccccggtacctgcgaatccttcgaccaccttcagtgcggcaaagtttgcttccttcatcacacagtactccacgggacaggtcagcgtggagatcgagtgggagctgcagaaggaaaacagcaaacgctggaatcccgaaattcagtacacttccaactacaacaagtctgttaatgtggactttactgtggacactaatggcgtgtattcagagcctcgccccattggcaccagatacctgactcgtaatctgtaa

SEQ ID NO: 4292 - DNA, 2208 bp, synthetic construct
  misc_feature 1..2208: note = source = /note="Description of Artificial Sequence: Synthetic polynucleotide"
  source 1..2208: mol_type = other DNA
atggctgccgatggttatcttccagattggctcgaggacactctctctgaaggaataagacagtggtggaagctcaaacctggcccaccaccaccaaagcccgcagagcggcataaggacgacagcaggggtcttgtgcttcctgggtacaagtacctcggacccttcaacggactcgacaagggagagccggtcaacgaggcagacgccgcggccctcgagcacgacaaagcctacgaccggcagctcgacagcggagacaacccgtacctcaagtacaaccacgccgacgcggagtttcaggagcgccttaaagaagatacgtcttttgggggcaacctcggacgagcagtcttccaggcgaaaaagagggttcttgaacctctgggcctggttgaggaacctgttaagacggctccgggaaaaaagaggccggtagagcactctcctgtggagccagactcctcctcgggaaccggaaaggcgggccagcagcctgcaagaaaaagattgaattttggtcagactggagacgcagactcagtacctgacccccagcctctcggacagccaccagcagccccctctggtctgggaactaatacgatggctacaggcagtggcgcaccaatggcagacaataacgagggcgccgacggagtgggtaattcctcgggaaattggcattgcgattccacatggatgggcgacagagtcatcaccaccagcacccgaacctgggccctgcccacctacaacaaccacctctacaaacaaatttccagccaatcaggagcctcgaacgacaatcactactttggctacagcaccccttgggggtattttgacttcaacagattccactgccacttttcaccacgtgactggcaaagactcatcaacaacaactggggattccgacccaagagactcaacttcaagctctttaacattcaagtcaaagaggtcacgcagaatgacggtacgacgacgattgccaataaccttaccagcacggttcaggtgtttactgactcggagtaccagctcccgtacgtcctcggctcggcgcatcaaggatgcctcccgccgttcccagcagacgtcttcatggtgccacagtatggatacctcaccctgaacaacgggagtcaggcagtaggacgctcttcattttactgcctggagtactttccttctcagatgctgcgtaccggaaacaactttaccttcagccacacttttgaggacgttcctttccacagcagctacgctcacagccagagtctggaccgtctcatgaatcctctcatcgaccagtacctgtattacttgagcagaacaaacactccaagtggaaccaccacgcagtcaaggcttcagttttctcaggccggagcgagtgacattcgggaccagtctaggaactggcttcctggaccctgttaccgccagcagcgagtatcaaagacatctgcggataacaacaacagtgaatactcgtggactggagctaccaagtaccacctcaatggcagagactctctggtgaatccgggcccggccatggcaagccacaaggacgatgaagaaaagttttttcctcagagcggggttctcatctttgggaagcaaggctcagagaaaacaaatgtggacattgaaaaggtcatgattacagacgaagaggaaatcaggacaaccaatcccgtggctacggagcagtatggttctgtatctaccaacctccagagaggcaacagacaagcagctaccgcagatgtcaacacacaaggcgttcttccaggcatggtctggcaggacagagatgtgtaccttcaggggcccatctgggcaaagattccacacacggacggacattttcacccctctcccctcatgggtggattcggacttaaacaccctcctccacagattctcatcaagaacaccccggtacctgcgaatccttcgaccaccttcagtgcggcaaagtttgcttccttcatcacacagtactccacgggacaggtcagcgtggagatcgagtgggagctgcagaaggaaaacagcaaacgctggaatcccgaaattcagtacacttccaactacaacaagtctgttaatgtggactttactgtggacactaatggcgtgtattcagagcctcgccccattggcaccagatacctgactcgtaatctgtaa

SEQ ID NO: 4293 - DNA, 2208 bp, synthetic construct
  misc_feature 1..2208: note = source = /note="Description of Artificial Sequence: Synthetic polynucleotide"
  source 1..2208: mol_type = other DNA
atggctgccgatggttatcttccagattggctcgaggacactctctctgaaggaataagacagtggtggaagctcaaacctggcccaccaccaccaaagcccgcagagcggcataaggacgacagcaggggtcttgtgcttcctgggtacaagtacctcggacccttcaacggactcgacaagggagagccggtcaacgaggcagacgccgcggccctcgagcacgacaaagcctacgaccggcagctcgacagcggagacaacccgtacctcaagtacaaccacgccgacgcggagtttcaggagcgccttaaagaagatacgtcttttgggggcaacctcggacgagcagtcttccaggcgaaaaagagggttcttgaacctctgggcctggttgaggaacctgttaagacggctccgggaaaaaagaggccggtagagcactctcctgtggagccagactcctcctcgggaaccggaaaggcgggccagcagcctgcaagaaaaagattgaattttggtcagactggagacgcagactcagtacctgacccccagcctctcggacagccaccagcagccccctctggtctgggaactaatacgatggctacaggcagtggcgcaccaatggcagacaataacgagggcgccgacggagtgggtaattcctcgggaaattggcattgcgattccacatggatgggcggcagagtcatcaccaccagcacccgaacctgggccctgcccacctacaacaaccacctctacaaacaaatttccagccaatcaggagcctcgaacgacaatcactactttggctacagcaccccttgggggtattttgacttcaacagattccactgccacttttcaccacgtgactggcaaagactcatcaacaacaactggggattccgacccaagagactcaacttcaagctctttaacattcaagtcaaagaggtcacgcagaatgacggtacgacgacgattgccaataaccttaccagcacggttcaggtgtttactgactcggagtaccagctcccgtacgtcctcggctcggcgcatcaaggatgcctcccgccgttcccagcagacgtcttcatggtgccacagtatggatacctcaccctgaacaacgggagtcaggcagtaggacgctcttcattttactgcctggagtactttccttctcagatgctgcgtaccggaaacaactttaccttcagctacacttttgaggacgttcctttccacagcagctacgctcacagccagagtctggaccgtctcatgaatcctctcatcgaccagtacctgtattacttgagcagaacaaacactccaagtggaaccaccacgcagtcaaggcttcagttttctcaggccggagcgagtgacattcgggaccagtctaggaactggcttcctggaccctgttaccgccagcagcgagtatcaaagacatctgcggataacaacaacagtgaatactcgtggactggagctaccaagtaccacctcaatggcagagactctctggtgaatccgggcccggccatggcaagccacaaggacgatgaagaaaagttttttcctcagagcggggttctcatctttgggaagcaaggctcagagaaaacaaatgtggacattgaaaaggtcatgattacagacgaagaggaaatcaggacaaccaatcccgtggctacggagcagtatggttctgtatctaccaacctccagagaggcaacagacaagcagctaccgcagatgtcaacacacaaggcgttcttccaggcatggtctggcaggacagagatgtgtaccttcaggggcccatctgggcaaagattccacacacggacggacattttcacccctctcccctcatgggtggattcggacttaaacaccctcctccacagattctcatcaagaacaccccggtacctgcgaatccttcgaccaccttcagtgcggcaaagtttgcttccttcatcacacagtactccacgggacaggtcagcgtggagatcgagtgggagctgcagaaggaaaacagcaaacgctggaatcccgaaattcagtacacttccaactacaacaagtctgttaatgtggactttactgtggacactaatggcgtgtattcagagcctcgccccattggcaccagatacctgactcgtaatctgtaa

SEQ ID NO: 4294 - DNA, 2208 bp, synthetic construct
  misc_feature 1..2208: note = source = /note="Description of Artificial Sequence: Synthetic polynucleotide"
  source 1..2208: mol_type = other DNA
atggctgccgatggttatcttccagattggctcgaggacactctctctgaaggaataagacagtggtggaagctcaaacctggcccaccaccaccaaagcccgcagagcggcataaggacgacagcaggggtcttgtgcttcctgggtacaagtacctcggacccttcaacggactcgacaagggagagccggtcaacgaggcagacgccgcggccctcgagcacgacaaagcctacgaccggcagctcgacagcggagacaacccgtacctcaagtacaaccacgccgacgcggagtttcaggagcgccttaaagaagatacgtcttttgggggcaacctcggacgagcagtcttccaggcgaaaaagagggttcttgaacctctgggcctggttgaggaacctgttaagacggctccgggaaaaaagaggccggtagagcactctcctgtggagccagactcctcctcgggaaccggaaaggcgggccagcagcctgcaagaaaaagattgaattttggtcagactggagacgcagactcagtacctgacccccagcctctcggacagccaccagcagccccctctggtctgggaactaatacgatggctacaggcagtggcgcaccaatggcagacaataacgagggcgccgacggagtgggtaattcctcgggaaattggcattgcgattccacatggatgggcgacagagtcatcaccaccagcacccgaacctgggccctgcccacctacaacaaccacctctacaaacaaatttccagccaatcaggagcctcgaacgacaatcactactttggctacagcaccccttgggggtattttgacttcaacagattccactgccacttttcaccacgtgactggcaaagactcatcaacaacaactggggattccgacccaagagacccaacttcaagctctttaacattcaagtcaaagaggtcacgcagaatgacggtacgacgacgattgccaataaccttaccagcacggttcaggtgtttactgactcggagtaccagctcccgtacgtcctcggctcggcgcatcaaggatgcctcccgccgttcccagcagacgtcttcatggtgccacagtatggatacctcaccctgaacaacgggagtcaggcagtaggacgctcttcattttactgcctggagtactttccttctcagatgctgcgtaccggaaacaactttaccttcagctacacttttgaggacgttcctttccacagcagctacgctcacagccagagtctggaccgtctcatgaatcctctcatcgaccagtacctgtattacttgagcagaacaaacactccaagtggaaccaccacgcagtcaaggcttcagttttctcaggccggagcgagtgacattcgggaccagtctaggaactggcttcctggaccctgttaccgccagcagcgagtatcaaagacatctgcggataacaacaacagtgaatactcgtggactggagctaccaagtaccacctcaatggcagagactctctggtgaatccgggcccggccatggcaagccacaaggacgatgaagaaaagttttttcctcagagcggggttctcatctttgggaagcaaggctcagagaaaacaaatgtggacattgaaaaggtcatgactacagacgaagaggaaatcaggacaaccaatcccgtggctacggagcagtatggttctgtatctaccaacctccagagaggcaacagacaagcagctaccgcagatgtcaacacacaaggcgttcttccaggcatggtctggcaggacagagatgtgtaccttcaggggcccatctgggcaaagattccacacacggacggacattttcacccctctcccctcatgggtggattcggacttaaacaccctcctccacagattctcatcaagaacaccccggtacctgcgaatccttcgaccaccttcagtgcggcaaagtttgcttccttcatcacacagtactccacgggacaggtcagcgtggagatcgagtgggagctgcagaaggaaaacagcaaacgctggaatcccgaaattcagtacacttccaactacaacaagtctgttaatgtggactttactgtggacactaatggcgtgtattcagagcctcgccccattggcaccagatacctgactcgtaatctgtaa

SEQ ID NO: 4295 - DNA, 2208 bp, synthetic construct
  misc_feature 1..2208: note = source = /note="Description of Artificial Sequence: Synthetic polynucleotide"
  source 1..2208: mol_type = other DNA
atggctgccgatggttatcttccagattggctcgaggacactctctctgaaggaataagacagtggtggaagctcaaacctggcccaccaccaccaaagcccgcagagcggcataaggacgacagcaggggtcttgtgcttcctgggtacaagtacctcggacccttcaacggactcgacaagggagagccggtcaacgaggcagacgccgcggccctcgagcacgacaaagcctacgaccggcagctcgacagcggagacaacccgtacctcaagtacaaccacgccgacgcggagtttcgggagcgccttaaagaagatacgtcttttgggggcaacctcggacgagcagtcttccaggcgaaaaagagggttcttgaacctctgggcctggttgaggaacctgttaagacggctccgggaaaaaagaggccggtagagcactctcctgtggagccagactcctcctcgggaaccggaaaggcgggccagcagcctgcaagaaaaagattgaattttggtcagactggagacgcagactcagtacctgacccccagcctctcggacagccaccagcagccccctctggtctgggaactaatacgatggctacaggcagtggcgcaccaatggcagacaataacgagggcgccgacggagtgggtaattcctcgggaaattggcattgcgattccacatggatgggcgacagagtcatcaccaccagcacccgaacctgggccctgcccacctacaacaaccacctctacaaacaaatttccagccaatcaggagcctcgaacgacaatcactactttggctacagcaccccttgggggtattttgacttcaacagattccactgccacttttcaccacgtgactggcaaagactcatcaacaacaactggggattccgacccaagagactcaacttcaagctctttaacattcaagtcaaagaggtcacgcagaatgacggtacgacgacgattgccaataaccttaccagcacggttcaggtgtttactgactcggagtaccagctcccgtacgtcctcggctcggcgcatcaaggatgcctcccgccgttcccagcagacgtcttcatggtgccacagtatggatacctcaccctgaacaacgggagtcaggcagtaggacgctcttcattttactgcctggagtactttccttctcagatgctgcgtaccggaaacaactttaccttcagctacacttttgaggacgttcctttccacagcagctacgctcacagccagagtctggaccgtctcatgaatcctctcatcgaccagtacctgtattacttgagcagaacaaacactccaagtggaaccaccacgcagtcaaggcttcagttttctcaggccggagcgagtgacattcgggaccagtctaggaactggcttcctggaccctgttaccgccagcagcgagtatcaaagacatctgcggataacaacaacagtgaatactcgtggactggagctaccaagtaccacctcaatggcagagactctctggtgaatccgggcccggccatggcaagccacaaggacgatgaagaaaagttttttcctcagagcggggttctcatctttgggaagcaaggctcagagaaaacaaatgtggacattgaaaaggtcatgactacagacgaagaggaaatcaggacaaccaatcccgtggctacggagcagtatggttctgtatctaccaacctccagagaggcaacagacaagcagctaccgcagatgtcaacacacaaggcgttcttccaggcatggtctggcaggacagagatgtgtaccttcaggggcccatctgggcaaagattccacacacggacggacattttcacccctctcccctcatgggtggattcggacttaaacaccctcctccacagattctcatcaagaacaccccggtacctgcgaatccttcgaccaccttcagtgcggcaaagtttgcttccttcatcacacagtactccacgggacaggtcagcgtggagatcgagtgggagctgcagaaggaaaacagcaaacgctggaatcccgaaattcagtacacttccaactacaacaagtctgttaatgtggactttactgtggacactaatggcgtgtattcagagcctcgccccattggcaccagatacctgactcgtaatctgtaa

SEQ ID NO: 4296 - DNA, 2208 bp, synthetic construct
  misc_feature 1..2208: note = source = /note="Description of Artificial Sequence: Synthetic polynucleotide"
  source 1..2208: mol_type = other DNA
atggctgccgatggttatcttccagattggctcgaggacactctctctgaaggaataagacagtggtggaagctcaaacctggcccaccaccaccaaagcccgcagagcggcataaggacgacagcaggggtcttgtgcttcctgggtacaagtacctcggacccttcaacggactcgacaagggagagccggtcaacgaggcagacgccgcggccctcgagcacgacaaagcctacgaccggcagctcgacagcggagacaacccgtacctcaagtacaaccacgccgacgcggagtttcaggagcgccttaaagaagatacgtcttttgggggcaacctcggacgagcagtcttccaggcgaaaaagagggttcttgaacctctgggcctggttgaggaacctgttaagacggctccgggaaaaaagaggccggtagagcactctcctgtggagccagacccctcctcgggaaccggaaaggcgggccagcagcctgcaagaaaaagattgaattttggtcagactggagacgcagactcagtacctgacccccagcctctcggacagccaccagcagccccctctggtctgggaactaatacgatggctacaggcagtggcgcaccaatggcagacaataacgagggcgccgacggagtgggtaattcctcgggaaattggcattgcgattccacatggatgggcgacagagtcatcaccaccagcacccgaacctgggccctgcccacctacaacaaccacctctacaaacaaatttccagccaatcaggagcctcgaacgacaatcactactttggctacagcaccccttgggggtattttgacttcaacagattccactgccacttttcaccacgtgactggcaaagactcatcaacaacaactggggattccgacccaagagactcaacttcaagctctttaacattcaagtcaaagaggtcacgcagaatgacggtacgacgacgattgccaataaccttaccagcacggttcaggtgtttactgactcggagtaccagctcccgtacgtcctcggctcggcgcatcaaggatgcctcccgccgttcccagcagacgtcttcatggtgccacagtatggatacctcaccctgaacaacgggagtcaggcagtaggacgctcttcattttactgcctggagtactttccttctcagatgctgcgtaccggaaacaactttaccttcagctacacttttgaggacgttcctttccacagcagctacgctcacagccagagtctggaccgtctcatgaatcccctcatcgaccagtacctgtattacttgagcagaacaaacactccaagtggaaccaccacgcagtcaaggcttcagttttctcaggccggagcgagtgacattcgggaccagtctaggaactggcttcctggaccctgttaccgccagcagcgagtatcaaagacatctgcggataacaacaacagtgaatactcgtggactggagctaccaagtaccacctcaatggcagagactctctggtgaatccgggcccggccatggcaagccacaaggacgatgaagaaaagttttttcctcagagcggggttctcatctttgggaagcaaggctcagagaaaacaaatgtggacattgaaaaggtcatgattacagacgaagaggaaatcaggacaaccaatcccgtggctacggagcagtatggttctgtatctaccaacctccagagaggcaacagacaagcagctaccgcagatgtcaacacacaaggcgttcttccaggcatggtctggcaggacagagatgtgtaccttcaggggcccatctgggcaaagattccacacacggacggacattttcacccctctcccctcatgggtggattcggacttaaacaccctcctccacagattctcatcaagaacaccccggtacctgcgaatccttcgaccaccttcagtgcggcaaagtttgcttccttcatcacacagtactccacgggacaggtcagcgtggagatcgagtgggagctgcagaaggaaaacagcaaacgctggaatcccgaaattcagtacacttccaactacaacaagtctgttaatgtggactttactgtggacactaatggcgtgtattcagagcctcgccccattggcaccagatacctgactcgtaatctgtaa

SEQ ID NO: 4297 - DNA, 2208 bp, synthetic construct
  misc_feature 1..2208: note = source = /note="Description of Artificial Sequence: Synthetic polynucleotide"
  source 1..2208: mol_type = other DNA
atggctgccgatggttatcttccagattggctcgaggacactctctctgaaggaataagacagtggtggaagctcaaacctggcccaccaccaccaaagcccgcagagcggcataaggacgacagcaggggtcttgtgcttcctgggtacaagtacctcggacccttcaacggactcgacaagggagagccggtcaacgaggcagacgccgcggccctcgagcacgacaaagcctacgaccggcagctcgacagcggagacaacccgtacctcaagtacaaccacgccgacgcggagtttcaggagcgccttaaagaagatacgtcttttgggggcaacctcggacgagcagtcttccaggcgaaaaagagggttcttgaacctctgggcctggttgaggaacctgttaagacggctccgggaaaaaagaggccggtagagcactctcctgtggagccagactcctcctcgggaaccggaaaggcgggccagcagcctgcaagaaaaagattgaattttggtcagactggagacgcagactcagtacctgacccccagcctctcggacagccaccagcagccccctctggtctgggaactaatacgatggctacaggcagtggcgcaccaatggcagacaataacgagggcgccgacggagtgggtaattcctcgggaaattggcattgcgattccacatggatgggcgacagagtcatcaccaccagcacccgaacctgggccctgcccacctacaacaaccacctctacaaacaaatttccagccaatcaggagcctcgaacgacaatcactactttggctacagcaccccttgggggtattttgacttcaacagattccactgccacttttcaccacgtgactggcaaagactcatcaacaacaactggggattccgacccaagagactcaacttcaagctctttaacattcaagtcaaagaggtcacgcagaatgacggtacgacgacgattgccaataaccttaccagcacggttcaggtgtttactgactcggagtaccagctcccgtacgtcctcggctcggcgcatcaaggatgcctcccgccgttcccagcagacgtcttcatggtgccacagtatggatacctcaccctgaacaacgggagtcaggcagtaggacgctcttcattttactgcctggagtactttccttctcagatgctgcgtaccggaaacaactttaccttcagctacacttttgaggacgttcctttccacagcagctacgctcacagccagagtctggaccgtctcatgaatcctctcatcgaccagtacctgtattacttgagcagaacaaacactccaagtggaaccaccacgcagtcaaggcttcagttttctcaggccggagcgagtgacattcgggaccagtctaggaactggcttcctggaccctgttaccgccagcagcgagtatcaaagacatctgcggataacaacaacagtgaatactcgtggactggagctaccaagtaccacctcaatggcagagactctctggtgaatccgggcccggccatggcaagccacaaggacgatgaagaaaagttttttcctcagagcggggttctcatctttgggaagcaaggctcagagaaaacaaatgtggacattgaaaaggtcatgattacagacgaagaggaaatcaggacaaccaatcccgtggctacggagcagtatggttctgtatctaccaacctccagagaggcaacagacaagcagctaccgcagatgtcaacacacaaggcgttcttccaggcatggtctggcaggacagagatgtgtaccttcaggggcccatctgggcaaagattccacacacggacggacattttcacccctctcccctcatgggtggattcggacttaaacaccctcctccacagattctcatcaagaacaccccggtacctgcgaatccttcgaccaccttcagtgcggcaaagtttgcttccttcatcacacagtactccacgggacaggtcagcgtggagatcgagtgggagctgcagaaggaaaacagcaaacgctggaatcccgaaattcagtacacttccaactacaacaagtctgttaatgtggactttactgtggacactaatggcgtgtattcagagtctcgccccattggcaccagatacctgactcgtaatctgtaa

SEQ ID NO: 4298 - DNA, 2208 bp, synthetic construct
  misc_feature 1..2208: note = source = /note="Description of Artificial Sequence: Synthetic polynucleotide"
  source 1..2208: mol_type = other DNA
atggctgccgatggttatcttccagattggctcgaggacactctctctgaaggaataagacagtggtggaagctcaaacctggcccaccaccaccaaagcccgcagagcggcataaggacgacagcaggggtcttgtgcttcctgggtacaagtacctcggacccttcaacggactcgacaagggagagccggtcaacgaggcagacgccgcggccctcgagcacgacaaagcctacgaccggcagctcgacagcggagacaacccgtacctcaagtacaaccacgccgacgcggagtttcaggagcgccttaaagaagatacgtcttttgggggcaacctcggacgagcagtcttccaggcgaaaaagagggttcttgaacctctgggcctggttgaggaacctgttaagacggctccgggaaaaaagaggccggtagagcactctcctgtggagccagactcctcctcgggaaccggaaaggcgggccagcagcctgcaagaaaaagattgaattttggtcagactggagacgcagactcagtacctgacccccagcctctcggacagccaccagcagccccctctggtctgggaactaatacgatggctacaggcagtggcgcaccaatggcagacaataacgagggcgccgacggagtgggtaattcctcgggaaattggcattgcgattccacatggatgggcgacagagtcatcaccaccagcacccgaacctgggccctgcccacctacaacaaccacctctacaaacaaatttccagccaatcaggagcctcgaacgacaatcactactttggctacagcaccccttgggggtattttgacttcaacagattccactgccacttttcaccacgtgactggcaaagactcatcaacaacaactggggattccgacccaagagactcaacttcaagctctttaacattcaagtcaaagaggtcacgcagaatgacggtacgacgacgattgccaataaccttaccagcacggttcaggtgtttactgactcggagtaccagctcccgtacgtcctcggctcggcgcatcaaggatgcctcccgccgttcccagcagacgtcttcatggtgccacagtatggatacctcaccccgaacaacgggagtcaggcagtaggacgctcttcattttactgcctggagtactttccttctcagatgctgcgtaccggaaacaactttaccttcagctacacttttgaggacgttcctttccacagcagctacgctcacagccagagtctggaccgtctcatgaatcctctcatcgaccagtacctgtattacttgagcagaacaaacactccaagtggaaccaccacgcagtcaaggcttcagttttctcaggccggagcgagtgacattcgggaccagtctaggaactggcttcctggaccctgttaccgccagcagcgagtatcaaagacatctgcggataacaacaacagtgaatactcgtggactggagctaccaagtaccacctcaatggcagagactctctggtgaatccgggcccggccatggcaagccacaaggacgatgaagaaaagttttttcctcagagcggggttctcatctttgggaagcaaggctcagagaaaacaaatgtggacattgaaaaggtcatgattacagacgaagaggaaatcaggacaaccaatcccgtggctacggagcagtatggttctgtatctaccaacctccagagaggcaacagacaagcagctaccgcagatgtcaacacacaaggcgttcttccaggcatggtctggcaggacagagatgtgtaccttcaggggcccatctgggcaaagattccacacacggacggacattttcacccctctcccctcatgggtggattcggacttaaacaccctcctccacagattctcatcaagaacaccccggtacctgcgaatccttcgaccaccttcagtgcggcaaagtttgcttccttcatcacacagtactccacgggacaggtcagcgtggagatcgagtgggagctgcagaaggaaaacagcaaacgctggaatcccgaaattcagtacacttccaactacaacaagtctgttaatgtggactttactgtggacactaatggcgtgtattcagagcctcgccccattggcaccagatacctgactcgtaatctgtaa

SEQ ID NO: 4299 - DNA, 2208 bp, synthetic construct
  misc_feature 1..2208: note = source = /note="Description of Artificial Sequence: Synthetic polynucleotide"
  source 1..2208: mol_type = other DNA
atggctgccgatggttatcttccagattggctcgaggacactctctctgaaggaataagacagtggtggaagctcaaacctggcccaccaccaccaaagcccgcagagcggcataaggacgacagcaggggtcttgtgcttcctgggtacaagtacctcggacccttcaacggactcgacaagggagagccggtcaacgaggcagacgccgcggccctcgagcacgacaaagcctacgaccggcagctcgacagcggagacaacccgtacctcaagtacaaccacgccgacgcggagtttcaggagcgccttaaagaagatacgtcttttgggggcaacctcggacgagcagtcttccaggcgaaaaagagggttcttgaacctctgggcctggttgaggaacctgttaagacggctccgggaaaaaagaggccggtagagcactctcctgtggagccagactcctcctcgggaaccggaaaggcgggccagcagcctgcaagaaaaagattgaattttggtcagactggagacgcagactcagtacctgacccccagcctctcggacagccaccagcagccccctctggtctgggaactaatacgatggctacaggcagtggcgcaccaatggcagacaataacgagggcgccgacggagtgggtaattcctcgggaaattggcattgcgattccacatggatgggcgacagagtcatcaccaccagcacccgaacctgggccctgcccacctacaacaaccacctctacaaacaaatttccagccaatcaggagcctcgaacgacaatcactactttggctacagcaccccttgggggtattttgacttcaacagattccactgccacttttcaccacgtgactggcaaagactcatcaacaacaactggggattccgacccaagagactcaacttcaagctctttaacattcaagtcaaagaggtcacgcagaatgacggtacgacgacgattgccaataaccttaccagcacggttcaggtgtttactgactcggagtaccagctcccgtacgtcctcggctcggcgcatcaaggatgcctcccgccgttcccagcagacgtcttcatggtgccacagtatggatacctcaccctgaacaacgggagtcaggcagtaggacgctcttcattttactgcctggagtactttccttctcagatgctgcgtaccggaaacaactttaccttcagctacacttttgaggacgttcctttccacagcagctacgctcacagccagagtctggaccgtctcatgaatcctctcatcgaccagtacctgtattacttgagcagaacaaacactccaagtggaaccaccacgcagtcaaggcttcagttttctcaggccggagcgagtgacattcgggaccagtctaggaactggcttcctggaccctgttaccgccagcagcgagtatcaaagacatctgcggataacaacaacagtgaatactcgtggactggagctaccaagtaccacctcaatggcagagactctctggtgaatccgggcccggccatggcaagccacaaggacgatgaagaaaagttttttcctcagagcggggttctcatctttgggaagcaaggctcagagaaaacaaatgtggacattgaaaaggtcatgattacagacgaagaggaaatcaggacaaccaatcccgtggctacggagcagtatggttctgtatctaccaacctccagagaggcaacagacaagcagctaccgcagatgtcaacacacaaggcgttcttccaggcatggcctggcaggacagagatgtgtaccttcaggggcccatctgggcaaagattccacacacggacggacattttcacccctctcccctcatgggtggattcggacttaaacaccctcctccacagattctcatcaagaacaccccggtacctgcgaatccttcgaccaccttcagtgcggcaaagtttgcttccttcatcacacagtactccacgggacaggtcagcgtggagatcgagtgggagctgcagaaggaaaacagcaaacgctggaatcccgaaattcagtacacttccaactacaacaagtctgttaatgtggactttactgtggacactaatggcgtgtattcagagcctcgccccattggcaccagatacctgactcgtaatctgtaa

SEQ ID NO: 4300 - DNA, 2208 bp, synthetic construct
  misc_feature 1..2208: note = source = /note="Description of Artificial Sequence: Synthetic polynucleotide"
  source 1..2208: mol_type = other DNA
atggctgccgatggttatcttccagattggctcgaggacactctctctgaaggaataagacagtggtggaagctcaaacctggcccaccaccgccaaagcccgcagagcggcacaaggacgacagtaggggtcttgtgcttcctgggtacaagtacctcggacccttcaacggactcgacaaaggagagccggtcaacgaggcagacgccgcggccctcgagcacgacaaggcctacgaccggcagctcgacagcggagacaacccgtacctcaagtacaaccacgccgacgcggagtttcaggagcgtcttaaagaagatacgtcttttgggggcaacctcggacgagcagtattccaggcgaaaaagagggttcttgaacctctgggcctggttgaggagcctgttaagacggctccgggaaaaaagaggccggtagagcactctcctgtggagccagactcctcctcgggaaccggaaaagcgggccagcagcctgcaagaaaaagattgaattttggtcagactggagacgcagactccgtacctgacccccagcctctcggacagccaccagcagcccccacaagtttgggatctactacaatggctacaggcagtggcgcaccaatggcagacaataacgagggtgccgatggagtgggtaattcctcaggaaattggcattgcgattcccaatggctgggcgacagagtcatcaccaccagcacccgaacctgggccctgcccacctacaacaaccacctctacaagcaaatctccagccaatcaggagcatcgaacgacaaccactactttggccacagcaccccttgggggtattttgacttcaacagattccactgtcacttctccccacgtgactggcaaagactcatcaacaacaactggggattccgacccaagagactcaacttcaagctctttaacattcaagtcaaagaggtcacgcagaatgacggtacgacgacgattgccaataaccttaccagcacggttcaggtgtttactgactcggagtaccagctcccgtacgtcctcggctcggcgcatcaaggatgcctcccgccgttcccagcagacgtcttcatggtcccacagtatggatacctcaccctgaacaacgggagtcaggcggtaggacgctcttccttttactgcctggagtactttccttctcagatgctgcgtaccggaaacaactttaccttcagctacacttttgaggacgttcctttccacagcagctacgctcacagccagagtctggaccgtctcatgaatcctctcatcgaccagtacctgtattacttgagcagaacaaacactccaagtggaaccaccacgcagtcaaggcttcagttttctcaggccggagcgagtgacattcgggaccagtctaggaactggcttcctggaccctgttaccgccagcagcgagtatcaaagacatctgcggataacaacaacagtgaatactcgtggactggagctaccaagtaccacctcaatggcagagactctctggtgaatccgggcccggccatggcaagccacaaggacgatgaagaaaagttttttcctcagagcggggttctcatctttgggaagcaaggctcagagaaaacaaatgtggacattgaaaaggtcatgattacagacgaagaggaaatcaggacaaccaatcccgtggctacggagcagtatggttctgtatctaccaacctccagagaggcaacagacaagcagctaccgcagatgtcaacacacaaggcgttcttccaggcatggtctggcaggacagagatgtgtaccttcaggggcccatctgggcaaagattccacacacggacggacattttcacccctctcccctcatgggtggattcggacttaaacaccctcctccacagattctcatcaagaacaccccggtacctgcgaatccttcgaccaccttcagtgcggcaaagtttgcttccttcatcacacagtactccacgggacaggtcagcgtggagatcgagtgggagctgcagaaggaaaacagcaaacgctggaatcccgaaattcagtacacttccaactacaacaagtctgttaatgtggactttactgtggacactaatggcgtgtattcagagcctcgccccattggcaccagatacctgactcgtaatctgtaa

SEQ ID NO: 4301 - DNA, 2208 bp, synthetic construct
  misc_feature 1..2208: note = source = /note="Description of Artificial Sequence: Synthetic polynucleotide"
  source 1..2208: mol_type = other DNA
atggctgccgatggttatcttccagattggctcgaggacactctctctgaaggaataagacagtggtggaagctcaaacctggcccaccaccaccaaagcccgcagagcggcataaggacgacagcaggggtcttgtgcttcctgggtacaagtacctcggacccttcaacggactcgacaagggagagccggtcaacgaggcagacgccgcggccctcgagcacgacaaagcctacgaccggcagctcgacagcggagacaacccgtacctcaagtacaaccacgccgacgcggagtttcaggagcgccttaaagaagatacgtcttttgggggcaacctcggacgagcagtcttccaggcgaaaaagagggttcttgaacctctgggcctggttgaggaacctgttaagacggctccgggaaaaaagaggccggtagagcactctcctgtggagccagactcctcctcgggaaccggaaaggcgggccagcagcctgcaagaaaaagattgaattttggtcagactggagacgcagactcagtacctgacccccagcctctcggacagccaccagcagccccctctggtctgggaactaatacgatggctacaggcagtggcgcaccaatggcagacaataacgagggcgccgacggagtgggtaattcctcgggaaattggcattgcgattccacatggatgggcgacagagtcatcaccaccagcacccgaacctgggccctgcccacctacaacaaccacctctacaaacaaatttccagccaatcaggagcctcgaacgacaatcactactttggctacagcaccccttgggggtattttgacttcaacagattccactgccacttttcaccacgtgactggcaaagactcatcaacaacaactggggattccgacccaagagactcaacttcaagctctttaacattcaagtcaaagaggtcacgcagaatgacggtacgacgacgattgccaataaccttaccagcacggttcaggtgtttactgactcggagtaccagctcccgtacgtcctcggctcggcgcatcaaggatgcctcccgccgttcccagcagacgtcttcatggtgccacagtatggatacctcaccctgaacaacgggagtcaggcagtaggacgctcttcattttactgcctggagtactttccttctcagatgctgcgtaccggaaacaactttaccttcagctacacttttgaggacgttcctttccacagcagctacgctcacagccagagtctggaccgtctcatgaatcctctcatcgaccagtacctgtattacttgagcagaacaaacactccaagtggaaccaccacgcagtcaaggcttcagttttctcaggccggagcgagtgacattcgggaccagtctaggaactggcttcctggaccctgttaccgccagcagcgagtatcaaagacatctgcggataacaacaacagtgaatactcgtggactggagctaccaagtaccacctcaatggcagagactctctggtgaatccgggcccggccatggcaagccacaaggacgatgaagaaaagttttttcctcagagcggggttctcatctttgggaagcaaggctcagagaaaacaaatgtggacattgaaaaggtcatgattacagacgaagaggaaatcaggacaaccaatcccgtggctacggagcagtatggttctgtatctaccaacctccagagaggcaacagacaagcagctaccgcagatgtcaacacacaaggcgttcttccaggcatggtctggcaggacagagatgtgtaccttcaggggcccatctgggcaaagattccacacacggacggacattttcacccctctcccctcatgggtggattcggacttaaacaccctcctccacagattctcatcaagaacaccccggtacctgcgaatccttcgaccaccttcagtgcggcaaagtttgcttccttcatcacacagtactccacgggacaggccagcgtggagatcgagtgggagctgcagaaggaaaacagcaaacgctggaatcccgaaattcagtacacttccaactacaacaagtctgttaatgtggactttactgtggacactaatggcgtgtattcagagcctcgccccattggcaccagatacctgactcgtaatctgtaa

SEQ ID NO: 4302 - DNA, 2208 bp, synthetic construct
  misc_feature 1..2208: note = source = /note="Description of Artificial Sequence: Synthetic polynucleotide"
  source 1..2208: mol_type = other DNA
atggctgccgatggttatcttccagattggctcgaggacactctctctgaaggaataagacagtggtggaagctcaaacctggcccaccaccaccaaagcccgcagagcggcataaggacgacagcaggggtcttgtgcttcctgggtacaagtacctcggacccttcaacggactcgacaagggagagccggtcaacgaggcagacgccgcggccctcgagcacgacaaagcctacgaccggcagctcgacagcggagacaacccgtacctcaagtacaaccacgccgacgcggagtttcaggagcgccttaaagaagatacgtcttttgggggcaacctcggacgagcagtcttccaggcgaaaaagagggttcttgaacctctgggcctggttgaggaacctgttaagacggctccgggaaaaaagaggccggtagagcactctcctgtggagccagactcctcctcgggaaccggaaaggcgggccagcagcctgcaagaaaaagattgaattttggtcagactggagacgcagactcagtacctgacccccagcctctcggacagccaccagcagccccctctggtctgggaactaatacgatggctacaggcagtggcgcaccaatggcagacaataacgagggcgccgacggagtgggtaattcctcgggaaattggcattgcgattccacatggatgggcgacagagtcatcaccaccagcacccgaacctgggccctgcccacctacaacaaccacctctacaaacaaatttccagccaatcaggagcctcgaacgacaatcactactttggctacagcaccccttgggggtattttgacttcaacagattccactgccacttttcaccacgtgactggcaaagactcatcaacaacaactggggattccgacccaagagactcaacttcaagctctttaacattcaagtcaaagaggtcacgcagaatgacggtacgacgacgattgccaataaccttaccagcacggttcaggtgtttactgactcggagtaccagctcccgtacgtcctcggctcggcgcatcaaggatgcctcccgccgttcccagcagacgtcttcatggtgccacagtatggatacctcaccctgaacaacgggagtcaggcagtaggacgctcttcattttactgcctggagtactttccttctcagatgctgcgtaccggaaacaactttaccttcagctacacttttgaggacgttcctttccacagcagctacgctcacagccagagtctggaccgtctcatgaatcctctcatcgaccagtacctgtattacttgagcagaacaaacactccaagtggaaccaccacgcagtcaaggcttcagttttctcaggccggagcgagtgacattcgggaccagtctaggaactggcttcctggaccctgttaccgccagcagcgagtatcaaagacatctgcggataacaacaacagtgaatactcgtggactggagctaccaagtaccacctcaatggcagagactctctggtgaatccgggcccggccatggcaagccacaaggacgatgaagaaaagttttttcctcagagcggggttctcatctttgggaagcaaggctcagagaaaacaaatgtggacattgaaaaggtcatgattacagacgaagaggaaatcaggacaaccaatcccgtggctacggagcagtatggttctgtatctaccaacctccagagaggcaacagacaagcagctaccgcagatgtcaacacacaaggcgttcttccaggcatggtctggcaggacagagatgtgtaccttcaggggcccatctgggcaaagattccacacacggacggacattttcacccctctcccctcatgggtggattcggacttaaacaccctcctccacagattctcatcaagaacaccccggtacctgcgaatccttcgaccaccttcagtgcggcaaggtttgcttccttcatcacacagtactccacgggacaggtcagcgtggagatcgagtgggagctgcagaaggaaaacagcaaacgctggaatcccgaaattcagtacacttccaactacaacaagtctgttaatgtggactttactgtggacactaatggcgtgtattcagagcctcgccccattggcaccagatacctgactcgtaatctgtaa

SEQ ID NO: 4303 - DNA, 2208 bp, synthetic construct
  misc_feature 1..2208: note = source = /note="Description of Artificial Sequence: Synthetic polynucleotide"
  source 1..2208: mol_type = other DNA
atggctgccgatggttatcttccagattggctcgaggacactctctctgaaggaataagacagtggtggaagctcaaacctggcccaccaccaccaaagcccgcagagcggcataaggacgacagcaggggtcttgtgcttcctgggtacaagtacctcggacccttcaacggactcgacaagggagagccggtcaacgaggcagacgccgcggccctcgagcacgacaaagcctacgaccggcagctcgacagcggagacaacccgtacctcaagtacaaccacgccgacgcggagtttcaggagcgccttaaagaagatacgtcttttgggggcaacctcggacgagcagtcttccaggcgaaaaagagggttcttgaacctctgggcctggttgaggaacctgttaagacggctccgggaaaaaagaggccggtagagcactctcctgtggagccagactcctcctcgggaaccggaaaggcgggccagcagcctgcaagaaaaagattgaattttggtcagactggaggcgcagactcagtacctgacccccagcctctcggacagccaccagcagccccctctggtctgggaactaatacgatggctacaggcagtggcgcaccaatggcagacaataacgagggcgccgacggagtgggtaattcctcgggaaattggcattgcgattccacatggatgggcgacagagtcatcaccaccagcacccgaacctgggccctgcccacctacaacaaccacctctacaaacaaatttccagccaatcaggagcctcgaacgacaatcactactttggctacagcaccccttgggggtattttgacttcaacagattccactgccacttttcaccacgtgactggcaaagactcatcaacaacaactggggattccgacccaagagactcaacttcaagctctttaacattcaagtcaaagaggtcacgcagaatgacggtacgacgacgattgccaataaccttaccagcacggttcaggtgtttactgactcggagtaccagctcccgtacgtcctcggctcggcgcatcaaggatgcctcccgccgttcccagcagacgtcttcatggtgccacagtatggatacctcaccctgaacaacgggagtcaggcagtaggacgctcttcattttactgcctggagtactttccttctcagatgctgcgtaccggaaacaactttaccttcagctacacttttgaggacgttcctttccacagcagctacgctcacagccagagtctggaccgtctcatgaatcctctcatcgaccagtacctgtattacttgagcagaacaaacactccaagtggaaccaccacgcagtcaaggcttcagttttctcaggccggagcgagtgacattcgggaccagtctaggaactggcttcctggaccctgttaccgccagcagcgagtatcaaagacatctgcggataacaacaacagtgaatactcgtggactggagctaccaagtaccacctcaatggcagagactctctggtgaatccgggcccggccatggcaagccacaaggacgatgaagaaaagttttttcctcagagcggggttctcatctttgggaagcaaggctcagagaaaacaaatgtggacattgaaaaggtcatgattacagacgaagaggaaatcaggacaaccaatcccgtggctacggagcagtatggttctgtatctaccaacctccagagaggcaacagacaagcagctaccgcagatgtcaacacacaaggcgttcttccaggcatggtctggcaggacagagatgtgtaccttcaggggcccatctgggcaaagattccacacacggacggacattttcacccctctcccctcatgggtggattcggacttaaacaccctcctccacagattctcatcaagaacaccccggtacctgcgaatccttcgaccaccttcagtgcggcaaagtttgcttccttcatcacacagtactccacgggacaggtcagcgtggagatcgagtgggagctgcagaaggaaaacagcaaacgctggaatcccgaaattcagtacacttccaactacaacaagtctgttaatgtggactttactgtggacactaatggcgtgtattcagagcctcgccccattggcaccagatacctgactcgtaatctgtaa

SEQ ID NO: 4304 - DNA, 2208 bp, synthetic construct
  misc_feature 1..2208: note = source = /note="Description of Artificial Sequence: Synthetic polynucleotide"
  source 1..2208: mol_type = other DNA
atggctgccgatggttatcttccagattggctcgaggacactctctctgaaggaataagacagtggtggaagctcaaacctggcccaccaccaccaaagcccgcagagcggcataaggacgacagcaggggtcttgtgcttcctgggtacaagtacctcggacccttcaacggactcgacaagggagagccggtcaacgaggcagacgccgcggccctcgagcacgacaaagcctacgaccggcagctcgacagcggagacaacccgtacctcaagtacaaccacgccgacgcggagtttcaggagcgccttaaagaagatacgtcttttgggggcaacctcggacgagcagtcttccaggcgaaaaagagggttcttgaacctctgggcctggttgaggaacctgttaagacggctccgggaaaaaagaggccggtagagcactctcctgtggagccagactcctcctcgggaaccggaaaggcgggccagcagcctgcaagaaaaagattgaattttggtcagactggagacgcagactcagtacctgacccccagcctctcggacagccaccagcagccccctctggtctgggaactaatacgatggctacaggcagtggcgcaccaatggcagacaataacgagggcgccgacggagtgggtaattcctcgggaaattggcattgcgattccacatggatgggcgacagagtcatcaccaccagcacccgaacctgggccctgcccacctacaacaaccacctctacaaacaaatttccagccaatcaggagcctcgaacgacaatcactactttggctacagcaccccttgggggtattttgacttcaacagattccactgccacttttcaccacgtgactggcaaagactcatcaacaacaactggggattccgacccaagagactcaacttcaagctctttaacattcaagtcaaagaggtcacgcagaatgacggtacgacgacgattgccaataaccttaccagcacggttcaggtgtttactgactcggagtaccagctcccgtacgtcctcggctcggcgcatcaaggatgcctcccgccgttcccagcagacgtcttcatggtgccacagtatggatacctcaccctgaacaacgggagtcaggcagtaggacgctcttcattttactgcctggagtactttccttctcagatgctgcgtaccggaaacaactttaccttcagctacacttttgaggacgttcctttccacagcagctacgctcacagccagagtctggaccgtctcatgaatcctctcatcgaccagtacctgtattacttgagcagaacaaacactccaagtggaaccaccacgcagtcaaggcttcagttttctcaggccggagcgagtgacattcgggaccagtctaggaactggcttcctggaccctgttaccgccagcagcgagtatcaaagacatctgcggataacaacaacagtgaatactcgtggactggagctaccaagtaccacctcaatggcagagactctctggtgaatccgggcccggccatggcaagccacaaggacgatgaagaaaagttttttcctcagagcggggttctcatctttgggaagcaaggctcagagaaaacaaatgtggacattgaaaaggtcatgattacagacgaagaggaaatcaggacaaccaatcccgtggctacggagcagtatggttctgtatctaccaacctccagagaggcaacagacaagcagctaccgcagatgtcaacacacaaggcgttcttccaggcatggtctggcaggacagagatgtgtaccttcaggggcccatctgggcaaagattccacacacggacggacattttcacccctctcccctcatgggtggattcggacttaaacaccctcctccacagattctcatcaagaacaccccggtacctgcgaatccttcgaccaccttcagtgcggcaaagtttgcttccttcatcacacagtactccacgggacaggtcagcgtggagatcgagtgggagctgcagaaggaaaacagcaaacgctggaatcccgaaattcagtacacttccaactacaacaagtctgctaatgtggactttactgtggacactaatggcgtgtattcagagcctcgccccattggcaccagatacctgactcgtaatctgtaa

SEQ ID NO: 4305 - DNA, 2208 bp, synthetic construct
  misc_feature 1..2208: note = source = /note="Description of Artificial Sequence: Synthetic polynucleotide"
  source 1..2208: mol_type = other DNA
atggctgccgatggttatcttccagattggctcgaggacactctctctgaaggaataagacagtggtggaagctcaaacctggcccaccaccaccaaagcccgcagagcggcataaggacgacagcaggggtcttgtgcttcctgggtacaagtacctcggacccttcaacggactcgacaagggagagccggtcaacgaggcagacgccgcggccctcgagcacgacaaagcctacgaccggcagctcgacagcggagacaacccgtacctcaagtacaaccacgccgacgcggagtttcaggagcgccttaaagaagatacgtcttttgggggcaacctcggacgagcagtcttccaggcgaaaaagagggttcttgaacctctgggcctggttgaggaacctgttaagacggctccgggaaaaaagaggccggtagagcactctcctgtggagccagactcctcctcgggaaccggaaaggcgggccagcagcctgcaagaaaaagattgaattttggtcagactggagacgcagactcagtacctgacccccagcctctcggacagccaccagcagccccctctggtctgggaactaatacgatggctacaggcagtggcgcaccaatggcagacaataacgagggcgccgacggagtgggtaattcctcgggaaattggcattgcgattccacatggatgggcgacagagtcatcaccaccagcacccgaacctgggccctgcccacctacaacaaccacctctacaaacaaatttccagccaatcaggagcctcgaacgacaatcactactttggctacagcaccccttgggggtattttgacttcaacagattccactgccacttttcaccacgtgactggcaaagactcatcaacaacaactggggattccgacccaagagactcaacttcaagctctttaacattcaagtcaaagaggtcacgcagaatgacggtacgacgacgattgccaataaccttaccagcacggttcaggtgtttactgactcggagtaccagctcccgtacgtcctcggctcggcgcatcaaggatgcctcccgccgttcccagcagacgtcttcatggtgccacagtatggatacctcaccctgaacaacgggagtcaggcagtaggacgctcttcattttactgcctggagtactttccttctcagatgctgcgtaccggaaacaactttaccttcagctacacttttgaggacgttcctttccacagcagctacgctcacagccagagtctggaccgtctcatgaatcctctcatcgaccagtacctgtattacttgagcagaacaaacactccaagtggaaccaccacgcagtcaaggcttcagttttctcaggccggagcgagtgacattcgggaccggtctaggaactggcttcctggaccctgttaccgccagcagcgagtatcaaagacatctgcggataacaacaacagtgaatactcgtggactggagctaccaagtaccacctcaatggcagagactctctggtgaatccgggcccggccatggcaagccacaaggacgatgaagaaaagttttttcctcagagcggggttctcatctttgggaagcaaggctcagagaaaacaaatgtggacattgaaaaggtcatgattacagacgaagaggaaatcaggacaaccaatcccgtggctacggagcagtatggttctgtatctaccaacctccagagaggcaacagacaagcagctaccgcagatgtcaacacacaaggcgttcttccaggcatggtctggcaggacagagatgtgtaccttcaggggcccatctgggcaaagattccacacacggacggacattttcacccctctcccctcatgggtggattcggacttaaacaccctcctccacagattctcatcaagaacaccccggtacctgcgaatccttcgaccaccttcagtgcggcaaagtttgcttccttcatcacacagtactccacgggacaggtcagcgtggagatcgagtgggagctgcagaaggaaaacagcaaacgctggaatcccgaaattcagtacacttccaactacaacaagtctgttaatgtggactttactgtggacactaatggcgtgtattcagagcctcgccccattggcaccagatacctgactcgtaatctgtaa

SEQ ID NO: 4306 - DNA, 2208 bp, synthetic construct
  misc_feature 1..2208: note = source = /note="Description of Artificial Sequence: Synthetic polynucleotide"
  source 1..2208: mol_type = other DNA
atggctgccgatggttatcttccagattggctcgaggacactctctctgaaggaataagacagtggtggaagctcaaacctggcccaccaccaccaaagcccgcagagcggcataaggacgacagcaggggtcttgtgcttcctgggtacaagtacctcggacccttcaacggactcgacaagggagagccggtcaacgaggcagacgccgcggccctcgagcacgacaaagcctacgaccggcagctcgacagcggagacaacccgtacctcaagtacaaccacgccgacgcggagtttcaggagcgccttaaagaagatacgtcttttgggggcaacctcggacgagcagtcttccaggcgaaaaagagggttcttgaacctctgggcctggttgaggaacctgttaagacggctccgggaaaaaagaggccggtagagcactctcctgtggagccagactcctcctcgggaaccggaaaggcgggccagcagcctgcaagaaaaagattgaattttggtcagactggagacgcagactcagtacctgacccccagcctctcggacagccaccagcagccccctctggtctgggaactaatacgatggctacaggcagtggcgcaccaatggcagacaataacgagggcgccgacggagtgggtaattcctcgggaaattggcattgcgattccacatggatgggcgacagagtcatcaccaccagcacccgaacctgggccctgcccacctacaacaaccacctctacaaacaaatttccagccaatcaggagcctcgaacgacaatcactactttggctacagcaccccttgggggtattttgacttcaacagattccactgccacttttcaccacgtgactggcaaagactcatcaacaacaactggggattccgacccaagagactcaacttcaagctctttaacattcaagtcaaagaggtcacgcagaatgacggtacgacgacgattgccaataaccttaccagcacggttcaggtgtttactgactcggagtaccagctcccgtacgtcctcggctcggcgcatcaaggatgcctcccgccgttcccagcagacgtcttcatggtgccacagtatggatacctcaccctgaacaacgggagtcaggcagtaggacgctcttcattttactgcctggagtactttccttctcagatgctgcgtaccggaaacaactttaccttcagctacacttttgaggacgttcctttccacagcagctacgctcacagccagagtctggaccgtctcatgaatcctctcatcgaccagtacctgtattacttgagcagaacaaacactccaagtggaaccaccacgcagtcaaggcttcagttttctcaggccggagcgagtgacattcgggaccagtctaggaactggcttcctggaccctgttaccgccagcagcgagtatcaaaggcatctgcggataacaacaacagtgaatactcgtggactggagctaccaagtaccacctcaatggcagagactctctggtgaatccgggcccggccatggcaagccacaaggacgatgaagaaaagttttttcctcagagcggggttctcatctttgggaagcaaggctcagagaaaacaaatgtggacattgaaaaggtcatgattacagacgaagaggaaatcaggacaaccaatcccgtggctacggagcagtatggttctgtatctaccaacctccagagaggcaacagacaagcagctaccgcagatgtcaacacacaaggcgttcttccaggcatggtctggcaggacagagatgtgtaccttcaggggcccatctgggcaaagattccacacacggacggacattttcacccctctcccctcatgggtggattcggacttaaacaccctcctccacagattctcatcaagaacaccccggtacctgcgaatccttcgaccaccttcagtgcggcaaagtttgcttccttcatcacacagtactccacgggacaggtcagcgtggagatcgagtgggagctgcagaaggaaaacagcaaacgctggaatcccgaaattcagtacacttccaactacaacaagtctgttaatgtggactttactgtggacactaatggcgtgtattcagagcctcgccccattggcaccagatacctgactcgtaatctgtaa

SEQ ID NO: 4307 - DNA, 2208 bp, synthetic construct
  misc_feature 1..2208: note = source = /note="Description of Artificial Sequence: Synthetic polynucleotide"
  source 1..2208: mol_type = other DNA
atggctgccgatggttatcttccagattggctcgaggacactctctctgaaggaataagacagtggtggaagctcaaacctggcccaccaccaccaaagcccgcagagcggcataaggacgacagcaggggtcttgtgcttcctgggtacaagtacctcggacccttcaacggactcgacaagggagagccggtcaacgaggcagacgccgcggccctcgagcacgacaaagcctacgaccggcagctcgacagcggagacaacccgtacctcaagtacaaccacgccgacgcggagtttcaggagcgccttaaagaagatacgtcttttgggggcaacctcggacgagcagtcttccaggcgaaaaagagggttcttgaacctctgggcctggttgaggaacctgttaagacggctccgggaaaaaagaggccggtagagcactctcctgtggagccagactcctcctcgggaaccggaaaggcgggccagcagcctgcaagaaaaagattgaattttggtcagactggagacgcagactcagtacctgacccccagcctctcggacagccaccagcagccccctctggtctgggaactaatacgatggctacaggcagtggcgcaccaatggcagacaataacgagggcgccgacggagtgggtaattcctcgggaaattggcattgcgattccacatggatgggcgacagagtcatcaccaccagcacccgaacctgggccctgcccacctacaacaaccacctctacaaacaaatttccagccaatcaggagcctcgaacgacaatcactactttggctacagcaccccttgggggtattttgacttcaacagattccactgccacttttcaccacgtgactggcaaagactcatcaacaacaactggggattccgacccaagagactcaacttcaagctctttaacattcaagtcaaagaggtcacgcagaatgacggtacgacgacgattgccaataaccttaccagcacggttcaggtgtttactgactcggagtaccagctcccgtacgtcctcggctcggcgcatcaaggatgcctcccgccgttcccagcagacgtcttcatggtgccacagtatggatacctcaccctgaacaacgggagtcaggcagtaggacgctcttcattttactgcctggagtactttccttctcagatgctgcgtaccggaaacaactttaccttcagctacacttttgaggacgttcctttccacagcagctacgctcacagccagagtctggaccgtctcatgaatcctctcatcgaccagtacctgtattacttgagcagaacaaacactccaagtggaaccaccacgcagtcaaggcttcagttttctcaggccggagcgagtgacattcgggaccagtctaggaactggcttcctggaccctgttaccgccagcagcgagtatcaaagacatctgcggataacaacaacagtgaatactcgtggactggagctaccaagcaccacctcaatggcagagactctctggtgaatccgggcccggccatggcaagccacaaggacgatgaagaaaagttttttcctcagagcggggttctcatctttgggaagcaaggctcagagaaaacaaatgtggacattgaaaaggtcatgattacagacgaagaggaaatcaggacaaccaatcccgtggctacggagcagtatggttctgtatctaccaacctccagagaggcaacagacaagcagctaccgcagatgtcaacacacaaggcgttcttccaggcatggtctggcaggacagagatgtgtaccttcaggggcccatctgggcaaagattccacacacggacggacattttcacccctctcccctcatgggtggattcggacttaaacaccctcctccacagattctcatcaagaacaccccggtacctgcgaatccttcgaccaccttcagtgcggcaaagtttgcttccttcatcacacagtactccacgggacaggtcagcgtggagatcgagtgggagctgcagaaggaaaacagcaaacgctggaatcccgaaattcagtacacttccaactacaacaagtctgttaatgtggactttactgtggacactaatggcgtgtattcagagcctcgccccattggcaccagatacctgactcgtaatctgtaa

SEQ ID NO: 4308 - DNA, 2208 bp, synthetic construct
  misc_feature 1..2208: note = source = /note="Description of Artificial Sequence: Synthetic polynucleotide"
  source 1..2208: mol_type = other DNA
atggctgccgatggttatcttccagattggctcgaggacactctctctgaaggaataagacagtggtggaagctcaaacctggcccaccaccaccaaagcccgcagagcggcataaggacgacagcaggggtcttgtgcttcctgggtacaagtacctcggacccttcaacggactcgacaagggagagccggtcaacgaggcagacgccgcggccctcgagcacgacaaagcctacgaccggcagctcgacagcggagacaacccgtacctcaagtacaaccacgccgacgcggagtttcaggagcgccttaaagaagatacgtcttttgggggcaacctcggacgagcagtcttccaggcgaaaaagagggttcttgaacctctgggcctggttgaggaacctgttaagacggctccgggaaaaaagaggccggtagagcactctcctgtggagccagactcctcctcgggaaccggaaaggcgggccagcagcctgcaagaaaaagattgaattttggtcagactggagacgcagactcagtacctgacccccagcctctcggacagccaccagcagccccctctggtctgggaactaatacgatggctacaggcagtggcgcaccaatggcagacaataacgagggcgccgacggagtgggtaattcctcgggaaattggcattgcgattccacatggatgggcgacagagtcatcaccaccagcacccgaacctgggccctgcccacctacaacaaccacctctacaaacaaatttccagccaatcaggagcctcgaacgacaatcactactttggctacagcaccccttgggggtattttgacttcaacagattccactgccacttttcaccacgtgactggcaaagactcatcaacaacaactggggattccgacccaagagactcaacttcaagctctttaacattcaagtcaaagaggtcacgcagaatgacggtacgacgacgattgccaataaccttaccggcacggttcaggtgtttactgactcggagtaccagctcccgtacgtcctcggctcggcgcatcaaggatgcctcccgccgttcccagcagacgtcttcatggtgccacagtatggatacctcaccctgaacaacgggagtcaggcagtaggacgctcttcattttactgcctggagtactttccttctcagatgctgcgtaccggaaacaactttaccttcagctacacttttgaggacgttcctttccacagcagctacgctcacagccagagtctggaccgtctcatgaatcctctcatcgaccagtacctgtattacttgagcagaacaaacactccaagtggaaccaccacgcagtcaaggcttcagttttctcaggccggagcgagtgacattcgggaccagtctaggaactggcttcctggaccctgttaccgccagcagcgagtatcaaagacatctgcggataacaacaacagtgaatactcgtggactggagctaccaagtaccacctcaatggcagagactctctggtgaatccgggcccggccatggcaagccacaaggacgatgaagaaaagttttttcctcagagcggggttctcatctttgggaagcaaggctcagagaaaacaaatgtggacattgaaaaggtcatgattacagacgaagaggaaatcaggacaaccaatcccgtggctacggagcagtatggttctgtatctaccaacctccagagaggcaacagacaagcagctaccgcagatgtcaacacacaaggcgttcttccaggcatggtctggcaggacagagatgtgtaccttcaggggcccatctgggcaaagattccacacacggacggacattttcacccctctcccctcatgggtggattcggacttaaacaccctcctccacagattctcatcaagaacaccccggtacctgcgaatccttcgaccaccttcagtgcggcaaagtttgcttccttcatcacacagtactccacgggacaggtcagcgtggagatcgagtgggagctgcagaaggaaaacagcaaacgctggaatcccgaaattcagtacacttccaactacaacaagtctgttaatgtggactttactgtggacactaatggcgtgtattcagagcctcgccccattggcaccagatacctgactcgtaatctgtaa

SEQ ID NO: 4309 - DNA, 2208 bp, synthetic construct
  misc_feature 1..2208: note = source = /note="Description of Artificial Sequence: Synthetic polynucleotide"
  source 1..2208: mol_type = other DNA
atggctgccgatggttatcttccagattggctcgaggacactctctctgaaggaataagacagtggtggaagctcaaacctggcccaccaccaccaaagcccgcagagcggcataaggacgacagcaggggtcttgtgcttcctgggtacaagtacctcggacccttcaacggactcgacaagggagagccggtcaacgaggcagacgccgcggccctcgagcacgacaaagcctacgaccggcagctcgacagcggagacaacccgtacctcaagtacaaccacgccgacgcggagtttcaggagcgccttaaagaagatacgtcttttgggggcaacctcggacgagcagtcttccgggcgaaaaagagggttcttgaacctctgggcctggttgaggaacctgttaagacggctccgggaaaaaagaggccggtagagcactctcctgtggagccagactcctcctcgggaaccggaaaggcgggccagcagcctgcaagaaaaagattgaattttggtcagactggagacgcagactcagtacctgacccccagcctctcggacagccaccagcagccccctctggtctgggaactaatacgatggctacaggcagtggcgcaccaatggcagacaataacgagggcgccgacggagtgggtaattcctcgggaaattggcattgcgattccacatggatgggcgacagagtcatcaccaccagcacccgaacctgggccctgcccacctacaacaaccacctctacaaacaaatttccagccaatcaggagcctcgaacgacaatcactactttggctacagcaccccttgggggtattttgacttcaacagattccactgccacttttcaccacgtgactggcaaagactcatcaacaacaactggggattccgacccaagagactcaacttcaagctctttaacattcaagtcaaagaggtcacgcagaatgacggtacgacgacgattgccaataaccttaccagcacggttcaggtgtttactgactcggagtaccagctcccgtacgtcctcggctcggcgcatcaaggatgcctcccgccgttcccagcagacgtcttcatggtgccacagtatggatacctcaccctgaacaacgggagtcaggcagtaggacgctcttcattttactgcctggagtactttccttctcagatgctgcgtaccggaaacaactttaccttcagctacacttttgaggacgttcctttccacagcagctacgctcacagccagagtctggaccgtctcatgaatcctctcatcgaccagtacctgtattacttgagcagaacaaacactccaagtggaaccaccacgcagtcaaggcttcagttttctcaggccggagcgagtgacattcgggaccagtctaggaactggcttcctggaccctgttaccgccagcagcgagtatcaaagacatctgcggataacaacaacagtgaatactcgtggactggagctaccaagtaccacctcaatggcagagactctctggtgaatccgggcccggccatggcaagccacaaggacgatgaagaaaagttttttcctcagagcggggttctcatctttgggaagcaaggctcagagaaaacaaatgtggacattgaaaaggtcatgattacagacgaagaggaaatcaggacaaccaatcccgtggctacggagcagtatggttctgtatctaccaacctccagagaggcaacagacaagcagctaccgcagatgtcaacacacaaggcgttcttccaggcatggtctggcaggacagagatgtgtaccttcaggggcccatctgggcaaagattccacacacggacggacattttcacccctctcccctcatgggtggattcggacttaaacaccctcctccacagattctcatcaagaacaccccggtacctgcgaatccttcgaccaccttcagtgcggcaaagtttgcttccttcatcacacagtactccacgggacaggtcagcgtggagatcgagtgggagctgcagaaggaaaacagcaaacgctggaatcccgaaattcagtacacttccaactacaacaagtctgttaatgtggactttactgtggacactaatggcgtgtattcagagcctcgccccattggcaccagatacctgactcgtaatctgtaa

SEQ ID NO: 4310 - DNA, 2208 bp, synthetic construct
  misc_feature 1..2208: note = source = /note="Description of Artificial Sequence: Synthetic polynucleotide"
  source 1..2208: mol_type = other DNA
atggctgccgatggttatcttccagattggctcgaggacactctctctgaaggaataagacagtggtggaagctcaaacctggcccaccaccaccaaagcccgcagagcggcataaggacgacagcaggggtcttgtgcttcctgggtacaagtacctcggacccttcaacggactcgacaagggagagccggtcaacgaggcagacgccgcggccctcgagcacgacaaagcctacgaccggcagctcgacagcggagacaacccgtacctcaagtacaaccacgccgacgcggagtttcaggagcgccttaaagaagatacgtcttttgggggcaacctcggacgagcagtcttccaggcgaaaaagagggttcttgaacctctgggcctggttgaggaacctgttaagacggctccgggaaaaaagaggccggtagagcactctcctgtggagccagactcctcctcgggaaccggaaaggcgggccagcagcctgcaagaaaaagattgaattttggtcagactggagacgcagactcagtacctgacccccagcctctcggacagccaccagcagccccctctggtctgggaactaatacgatggctacaggcagtggcgcaccaatggcagacaataacgagggcgccgacggagtgggtaattcctcgggaaattggcattgcgattccacatggatgggcgacagagtcatcaccaccagcacccgaacctgggccctgcccacctacaacaaccacctctacaaacaaatttccagccaatcaggagcctcgaacgacaatcactactttggctacagcaccccttgggggtattttgacttcaacagattccactgccacttttcaccacgtgactggcaaagactcatcaacaacaactggggattccgacccaagagactcaacttcaagctctttaacattcaagtcaaagaggtcacgcagaatgacggtacgacgacgattgccaataaccttaccagcacggttcaggtgtttactgactcggagtaccagctcccgtacgtcctcggctcggcgcatcaaggatgcctcccgccgttcccagcagacgtcttcatggtgccacagtatggatacctcaccctgaacaacgggagtcaggcagtaggacgctcttcattttactgcctggagtactttccttctcagatgctgcgtaccggaaacaactttaccttcagctacacttttgaggacgttcctttccacagcagctacgctcacagccagagtctggaccgtctcatgaatcctctcatcgaccagtacctgtattacttgagcagaacaaacactccaagtggaaccaccacgcagtcaaggcttcagttttctcaggccggagcgagtgacattcgggaccagtctaggaactggcttcctggaccctgttaccgccagcagcgagtatcaaagacatctgcggataacaacaacagtgaatactcgtggactggagctaccaagtaccacctcaatggcagagactctctggtgaatccgggcccggccatggcaagccacaaggacgatgaagaaaagttttttcctcagagcggggttctcatctttgggaagcaaggctcagagaaaacaaatgtggacattgaaaaggtcatgattacagacgaagaggaaatcaggacaaccaatcccgtggctacggagcagtatggttctgtatctaccaacctccagagaggcaacagacaagcagctaccgcagatgtcaacacacaaggcgttcttccaggcacggtctggcaggacagagatgtgtaccttcaggggcccatctgggcaaagattccacacacggacggacattttcacccctctcccctcatgggtggattcggacttaaacaccctcctccacagattctcatcaagaacaccccggtacctgcgaatccttcgaccaccttcagtgcggcaaagtttgcttccttcatcacacagtactccacgggacaggccagcgtggagatcgagtgggagctgcagaaggaaaacagcaaacgctggaatcccgaaattcagtacacttccaactacaacaagtctgttaatgtggactttactgtggacactaatggcgtgtattcagagcctcgccccattggcaccagatacctgactcgtaatctgtaa

SEQ ID NO: 4311 - DNA, 2208 bp, synthetic construct
  misc_feature 1..2208: note = source = /note="Description of Artificial Sequence: Synthetic polynucleotide"
  source 1..2208: mol_type = other DNA
atggctgccgatggttatcttccagattggctcgaggacactctctctgaaggaataagacagtggtggaagctcaaacctggcccaccaccgccaaagcccgcagagcggcacaaggacgccagtaggggtcttgtgcttcctgggtacaagtacctcggacccttcaacggactcgacaaaggagagccggtcaacgaggcagacgccgcggccctcgagcacgacaaggcctacgaccggcagctcgacagcggagacaacccgtacctcaagtacaaccacgccgacgcggagtttcaggagcgtcttaaagaagatacgtcttttgggggcaacctcggacgagcagtattccaggcgaaaaagagggttcttgaacctctgggcctggttgaggagcctgttaagacggctccgggaaaaaagaggccggtagagcactctcctgtggagccagactcctcctcgggaaccggaaaagcgggccagcagcctgcaagaaaaagattgaattttggtcagactggagacgcagactccgtacctgacccccagcctctcggacagccaccagcagcccccacaagtttgggatctactacaatggctacaggcagtggcgcaccaatggcagacaataacgagggtgccgatggagtgggtaattcctcaggaaattggcattgcgattcccaatggctgggcgacagagtcatcaccaccagcacccgaacctgggccctgcccacctacaacaaccacctctacaagcaaatctccagccaatcaggagcatcgaacgacaaccactactttggctacagcaccccttgggggtattttgacttcaacagattccactgtcacttctccccacgtgactggcaaagactcatcaacaacaactggggattccgacccaagagactcaacttcaagctctttaacattcaagtcaaagaggtcacgcagaatgacggtacgacgacgattgccaataaccttaccagcacggttcaggtgtttactgactcggagtaccagctcccgtacgtcctcggctcggcgcatcaaggatgcctcccgccgttcccagcagacgtcttcatggtcccacagtatggatacctcaccctgaacaacgggagtcaggcggtaggacgctcttccttttactgcctggagtactttccttctcagatgctgcgtaccggaaacaactttaccttcagctacacttttgaggacgttcctttccacagcagctacgctcacagccagagtctggaccgtctcatgaatcctctcatcgaccagtacctgtattacttgagcagaacaaacactccaagtggaaccaccacgcagtcaaggcttcagttttctcaggccggagcgagtgacattcgggaccagtctaggaactggcttcctggaccctgttaccgccagcagcgagtatcaaagacatctgcggataacaacaacagtgaatactcgtggactggagctaccaagtaccacctcaatggcagagactctctggtgaatccgggcccggccatggcaagccacaaggacgatgaagaaaagttttttcctcagagcggggttctcatctttgggaagcaaggctcagagaaaacaaatgtggacattgaaaaggtcatgattacagacgaagaggaaatcaggacaaccaatcccgtggctacggagcagtatggttctgtatctaccaacctccagagaggcaacagacaagcagctaccgcagatgtcaacacacaaggcgttcttccaggcatggtctggcaggacagagatgtgtaccttcaggggcccatctgggcaaagattccacacacggacggacattttcacccctctcccctcatgggtggattcggacttaaacaccctcctccacagattctcatcaagaacaccccggtacctgcgaatccttcgaccaccttcagtgcggcaaagtttgcttccttcatcacacagtactccacgggacaggtcagcgtggagatcgagtgggagctgcagaaggaaaacagcaaacgctggaatcccgaaattcagtacacttccaactacaacaagtctgttaatgtggactttactgtggacactaatggcgtgtattcagagcctcgccccattggcaccagatacctgactcgtaatctgtaa

SEQ ID NO: 4312 - DNA, 2208 bp, synthetic construct
  misc_feature 1..2208: note = source = /note="Description of Artificial Sequence: Synthetic polynucleotide"
  source 1..2208: mol_type = other DNA
atggctgccgatggttatcttccagattggctcgaggacactctctctgaaggaataagacagtggtggaagctcaaacctggcccaccaccaccaaagcccgcagagcggcataaggacgacagcaggggtcttgtgcttcctgggtacaagtacctcggacccttcaacggactcgacaagggagagccggtcaacgaggcagacgccgcggccctcgagcacgacaaagcctacgaccggcagctcgacagcggagacaacccgtacctcaagtacaaccacgccgacgcggagtttcaggagcgccttaaagaagatacgtcttttgggggcaacctcggacgagcagtcttccaggcgaaaaagagggttcttgaacctctgggcctggttgaggaacctgttaagacggctccgggaaaaaagaggccggtagagcactctcctgtggagccagactcctcctcgggaaccggaaaggcgggccagcagcctgcaagaaaaagattgaattttggtcagactggagacgcagactcagtacctgacccccagcctctcggacagccaccagcagccccctctggtctgggaactaatacgatggctacaggcagtggcgcaccaatggcagacaataacgagggcgccgacggagtgggtaattcctcgggaaattggcattgcgattccacatggatgggcgacagagtcatcaccaccagcacccgaacctgggccctgcccacctacaacaaccacctctacaaacaaatttccagccaatcaggagccccgaacgacaatcactactttggctacagcaccccttgggggtattttgacttcaacagattccactgccacttttcaccacgtgactggcaaagactcatcaacaacaactggggattccgacccaagagactcaacttcaagctctttaacattcaagtcaaagaggtcacgcagaatgacggtacgacgacgattgccaataaccttaccagcacggttcaggtgtttactgactcggagtaccagctcccgtacgtcctcggctcggcgcatcaaggatgcctcccgccgttcccagcagacgtcttcatggtgccacagtatggatacctcaccctgaacaacgggagtcaggcagtaggacgctcttcattttactgcctggagtactttccttctcagatgctgcgtaccggaaacaactttaccttcagctacacttttgaggacgttcctttccacagcagctacgctcacagccagagtctggaccgtctcatgaatcctctcatcgaccagtacctgtattacttgagcagaacaaacactccaagtggaaccaccacgcagtcaaggcttcagttttctcaggccggagcgagtgacattcgggaccagtctaggaactggcttcctggaccctgttaccgccagcagcgagtatcaaagacatctgcggataacaacaacagtgaatactcgtggactggagctaccaagtaccacctcaatggcagagactctctggtgaatccgggcccggccatggcaagccacaaggacgatgaagaaaagttttttcctcagagcggggttctcatctttgggaagcaaggctcagagaaaacaaatgtggacattgaaaaggtcatgattacagacgaagaggaaatcaggacaaccaatcccgtggctacggagcagtatggttctgtatctaccaacctccagagaggcaacagacaagcagctaccgcagatgtcaacacacaaggcgttcttccaggcatggtctggcaggacagagatgtgtaccttcaggggcccatctgggcaaagattccacacacggacggacattttcacccctctcccctcatgggtggattcggacttaaacaccctcctccacagattctcatcaagaacaccccggtacctgcgaatccttcgaccaccttcagtgcggcaaagtttgcttccttcatcacacagtactccacgggacaggccagcgtggagatcgagtgggagctgcagaaggaaaacagcaaacgctggaatcccgaaattcagtacacttccaactacaacaagtctgttaatgtggactttactgtggacactaatggcgtgtattcagagcctcgccccattggcaccagatacctgactcgtaatctgtaa

SEQ ID NO: 4313 - DNA, 2208 bp, synthetic construct
  misc_feature 1..2208: note = source = /note="Description of Artificial Sequence: Synthetic polynucleotide"
  source 1..2208: mol_type = other DNA
atggctgccgatggttatcttccagattggctcgaggacactctctctgaaggaataagacagtggtggaagctcaaacctggcccaccaccaccaaagcccgcagagcggcataaggacgacagcaggggtcttgtgcttcctgggtacaagtacctcggacccttcaacggactcgacaaaggagagccggtcaacgaggcagacgccgcggccctcgagcacgacaaggcctacgaccggcagctcgacagcggagacaacccgtacctcaagtacaaccacgccgacgcggagtttcaggagcgtcttaaagaagatacgtcttttgggggcaacctcggacgagcagtattccaggcgaaaaagagggttcttgaacctctgggcctggttgaggagcctgttaagacggctccgggaaaaaagaggccggtagagcactctcctgtggagccagactcctcctcgggaaccggaaaagcgggccagcagcctgcaagaaaaagattgaattttggtcagactggagacgcagactccgtacctgacccccagcctctcggacagccaccagcagcccccacaagtttgggatctactacaatggctacaggcagtggcgcaccaatggcagacaataacgagggtgccgatggagtgggtaattcctcaggaaattggcattgcgattcccaatggctgggcgacagagtcatcaccaccagcacccgaacctgggccctgcccacctacaacaaccacctctacaaacaaatttccagccaatcaggagcctcgaacgacaatcactactttggctacagcaccccttgggggtattttgacttcaacagattccactgccacttttcaccacgtgactggcaaagactcatcaacaacaactggggattccgacccaagagactcaacttcaagctctttaacattcaagtcaaagaggtcacgcagaatgacggtacgacgacgattgccaataaccttaccagcacggttcaggtgtttactgactcggagtaccagctcccgtacgtcctcggctcggcgcatcaaggatgcctcccgccgttcccagcagacgtcttcatggtgccacagtatggatacctcaccctgaacaacgggagtcaggcagtaggacgctcttcattttactgcctggagtactttccttctcagatgctgcgtaccggaaacaactttaccttcagctacacttttgaggacgttcctttccacagcagctacgctcacagccagagtctggaccgtctcatgaatcctctcatcgaccagtacctgtattacttgagcagaacaaacactccaagtggaaccaccacgcagtcaaggcttcagttttctcaggccggagcgagtgacattcgggaccagtctaggaactggcttcctggaccctgttaccgccagcagcgagtatcaaagacatctgcggataacaacaacagtgaatactcgtggactggagctaccaagtaccacctcaatggcagagactctctggtgaatccgggcccggccatggcaagccacaaggacgatgaagaaaagttttttcctcagagcggggttctcatctttgggaagcaaggctcagagaaaacaaatgtggacattgaaaaggtcatgattacagacgaagaggaaatcaggacaaccaatcccgtggctacggagcagtatggttctgtatctaccaacctccagagaggcaacagacaagcagctaccgcagatgtcaacacacaaggcgttcttccaggcatggtctggcaggacagagatgtgtaccttcaggggcccatctgggcaaagattccacacacggacggacattttcacccctctcccctcatgggtggattcggacttaaacaccctcctccacagattctcatcaagaacaccccggtacctgcgaatccttcgaccaccttcagtgcggcaaagtttgcttccttcatcacacagtactccacgggacaggtcagcgtggagatcgagtgggagctgcagaaggaaaacagcaaacgctggaatcccgaaattcagtacacttccaactacaacaagtctgttaatgtggactttactgtggacactaatggcgtgtattcagagcctcgccccattggcaccagatacctgactcgtaatctgtaa

SEQ ID NO: 4314 - DNA, 2208 bp, synthetic construct
  misc_feature 1..2208: note = source = /note="Description of Artificial Sequence: Synthetic polynucleotide"
  source 1..2208: mol_type = other DNA
atggctgccgatggttatcttccagattggctcgaggacattctctctgaaggaataagacagtggtggaagctcaaacctggcccaccaccgccaaagcccgcagagcggcacaaggacgccagtaggggtcttgtgcttcctgggtacaagtacctcggacccttcaacggactcgacaaaggagagccggtcaacgaggcagacgccgcggccctcgagcacgacaaggcctacgaccggcagctcgacagcggagacaacccgtacctcaagtacaaccacgccgacgcggagtttcaggagcgtcttaaagaagatacgtcttttgggggcaacctcggacgagcagtattccaggcgaaaaagagggttcttgaacctctgggcctggttgaggagcctgttaagacggctccgggaaaaaagaggccggtagagcactctcctgtggagccagactcctcctcgggaaccggaaaagcgggccagcagcctgcaagaaaaagattgaattttggtcagactggagacgcagactccgtacctgacccccagcctctcggacagccaccagcagcccccacaagtttgggatctactacaatggctacaggcagtggcgcaccaatggcagacaataacgagggtgccgatggagtgggtaattcctcaggaaattggcattgcgattcccaatggctgggcgacagagtcatcaccaccagcacccgaacctgggccctgcccacctacaacaaccacctctacaagcaaatctccagccaatcaggagcatcgaacgacaaccactactttggctacagcaccccttgggggtattttgacttcaacagattccactgtcacttctccccacgtgactggcaaagactcatcaacaacaactggggattccgacccaagagactcaacttcaagctctttaacattcaagtcaaagaggtcacgcagaatgacggtacgacgacgattgccaataaccttaccagcacggttcaggtgtttactgactcggagtaccagctcccgtacgtcctcggctcggcgcatcaaggatgcctcccgccgttcccagcagacgtcttcatggtgccacagtatggatacctcaccctgaacaacgggagtcaggcagtaggacgctcttcattttactgcctggagtactttccttctcagatgctgcgtaccggaaacaactttaccttcagctacacttttgaggacgttcctttccacagcagctacgctcacagccagagtctggaccgtctcatgaatcctctcatcgaccagtacctgtattacttgagcagaacaaacactccaagtggaaccaccacgcagtcaaggcttcagttttctcaggccggagcgagtgacattcgggaccagtctaggaactggcttcctggaccctgttaccgccagcagcgagtatcaaagacatctgcggataacaacaacagtgaatactcgtggactggagctaccaagtaccacctcaatggcagagactctctggtgaatccgggcccggccatggcaagccacaaggacgatgaagaaaagttttttcctcagagcggggttctcatctttgggaagcaaggctcagagaaaacaaatgtggacattgaaaaggtcatgattacagacgaagaggaaatcaggacaaccaatcccgtggctacggagcagtatggttctgtatctaccaacctccagagaggcaacagacaagcagctaccgcagatgtcaacacacaaggcgttcttccaggcatggtctggcaggacagagatgtgtaccttcaggggcccatctgggcaaagattccacacacggacggacattttcacccctctcccctcatgggtggattcggacttaaacaccctcctccacagattctcatcaagaacaccccggtacctgcgaatccttcgaccaccttcagtgcggcaaagtttgcttccttcatcacacagtactccacgggacaggtcagcgtggagatcgagtgggagctgcagaaggaaaacagcaaacgctggaatcccgaaattcagtacacttccaactacaacaagtctgttaatgtggactttactgtggacactaatggcgtgtattcagagcctcgccccattggcaccagatacctgactcgtaatctgtaa

SEQ ID NO: 4315 - DNA, 2208 bp, synthetic construct
  misc_feature 1..2208: note = source = /note="Description of Artificial Sequence: Synthetic polynucleotide"
  source 1..2208: mol_type = other DNA
atggctgccgatggttatcttccagattggctcgaggacactctctctgaaggaataagacagtggtggaagctcaaacctggcccaccaccgccaaagcccgcagagcggcacaaggacgccagtaggggtcttgtgcttcctgggtacaagtacctcggacccttcaacggactcgacaaaggagagccggtcaacgaggcagacgccgcggccctcgagcacgacaaggcctacgaccggcagctcgacagcggagacaacccgtacctcaagtacaaccacgccgacgcggagtttcaggagcgtcttaaagaagatacgtcttttgggggcaacctcggacgagcagtattccaggcgaaaaagagggttcttgaacctctgggcctggttgaggagcctgttaagacggctccgggaaaaaagaggccggtagagcactctcctgtggagccagactcctcctcgggaaccggaaaagcgggccagcagcctgcaagaaaaagattgaattttggtcagactggagacgcagactcagtacctgacccccagcctctcggacagccaccagcagccccctctggtctgggaactaatacgatggctacaggcagtggcgcaccaatggcagacaataacgagggcgccgacggagtgggtaattcctcgggaaattggcattgcgattccacatggatgggcgacagagtcatcaccaccagcacccgaacctgggccctgcccacctacaacaaccacctctacaaacaaatttccagccaatcaggagcctcgaacgacaatcactactttggctacagcaccccttgggggtattttgacttcaacagattccactgccacttttcaccacgtgactggcaaagactcatcaacaacaactggggattccgacccaagagactcaacttcaagctctttaacattcaagtcaaagaggtcacgcagaatgacggtacgacgacgattgccaataaccttaccagcacggttcaggtgtttactgactcggagtaccagctcccgtacgtcctcggctcggcgcatcaaggatgcctcccgccgttcccagcagacgtcttcatggtgccacagtatggatacctcaccctgaacaacgggagtcaggcagtaggacgctcttcattttactgcctggagtactttccttctcagatgctgcgtaccggaaacaactttaccttcagctacacttttgaggacgttcctttccacagcagctacgctcacagccagagtctggaccgtctcatgaatcctctcatcgaccagtacctgtattacttgagcagaacaaacactccaagtggaaccaccacgcagtcaaggcttcagttttctcaggccggagcgagtgacattcgggaccagtctaggaactggcttcctggaccctgttaccgccagcagcgagtatcaaagacatctgcggataacaacaacagtgaatactcgtggactggagctaccaagtaccacctcaatggcagagactctctggtgaatccgggcccggccatggcaagccacaaggacgatgaagaaaagttttttcctcagagcggggttctcatctttgggaagcaaggctcagagaaaacaaatgtggacattgaaaaggtcatgattacagacgaagaggaaatcaggacaaccaatcccgtggctacggagcagtatggttctgtatctaccaacctccagagaggcaacagacaagcagctaccgcagatgtcaacacacaaggcgttcttccaggcatggtctggcaggacagagatgtgtaccttcaggggcccatctgggcaaagattccacacacggacggacattttcacccctctcccctcatgggtggattcggacttaaacaccctcctccacagattctcatcaagaacaccccggtacctgcgaatccttcgaccaccttcagtgcggcaaagtttgcttccttcatcacacagtactccacgggacaggccagcgtggagatcgagtgggagctgcagaaggaaaacagcaaacgctggaatcccgaaattcagtacacttccaactacaacaagtctgttaatgtggactttactgtggacactaatggcgtgtattcagagcctcgccccattggcaccagatacctgactcgtaatctgtaa

SEQ ID NO: 4316 - DNA, 2208 bp, synthetic construct
  misc_feature 1..2208: note = source = /note="Description of Artificial Sequence: Synthetic polynucleotide"
  source 1..2208: mol_type = other DNA
atggctgccgatggttatcttccagattggctcgaggacactctctctgaaggaataagacagtggtggaagctcaaacctggcccaccaccaccaaagcccgcagagcggcataaggacgacagcaggggtcttgtgcttcctgggtacaagtacctcggacccttcaacggactcgacaagggagagccggtcaacgaggcagacgccgcggccctcgagcacgacaaagcctacgaccggcagctcgacagcggagacaacccgtacctcaagtacaaccacgccgacgcggagtttcaggagcgccttaaagaagatacgtcttttgggggcaacctcggacgagcagtattccaggcgaaaaagagggttcttgaacctctgggcctggttgaggagcctgttaagacggctccgggaaaaaagaggccggtagagcactctcctgtggagccagactcctcctcgggaaccggaaaagcgggccagcagcctgcaagaaaaagattgaattttggtcagactggagacgcagactccgtacctgacccccagcctctcggacagccaccagcagcccccacaagtttgggatctactacaatggctacaggcagtggcgcaccaatggcagacaataacgagggtgccgatggagtgggtaattcctcrggaaattggcattgcgattccacatggatgggcgacagagtcatcaccaccagcacccgaacctgggccctgcccacctacaacaaccacctctacaaacaaatttccagccaatcaggagcctcgaacgacaatcactactttggctacagcaccccttgggggtattttgacttcaacagattccactgccacttttcaccacgtgactggcaaagactcatcaacaacaactggggattccgacccaagagactcaacttcaagctctttaacattcaagtcaaagaggtcacgcagaatgacggtacgacgacgattgccaataaccttaccagcacggttcaggtgtttactgactcggagtaccagctcccgtacgtcctcggctcggcgcatcaaggatgcctcccgccgttcccagcagacgtcttcatggtgccacagtatggatacctcaccctgaacaacgggagtcaggcagtaggacgctcttcattttactgcctggagtactttccttctcagatgctgcgtaccggaaacaactttaccttcagctacacttttgaggacgttcctttccacagcagctacgctcacagccagagtctggaccgtctcatgaatcctctcatcgaccagtacctgtattacttgagcagaacaaacactccaagtggaaccaccacgcagtcaaggcttcagttttctcaggccggagcgagtgacattcgggaccagtctaggaactggcttcctggaccctgttaccgccagcagcgagtatcaaagacatctgcggataacaacaacagtgaatactcgtggactggagctaccaagtaccacctcaatggcagagactctctggtgaatccgggcccggccatggcaagccacaaggacgatgaagaaaagttttttcctcagagcggggttctcatctttgggaagcaaggctcagagaaaacaaatgtggacattgaaaaggtcatgattacagacgaagaggaaatcaggacaaccaatcccgtggctacggagcagtatggttctgtatctaccaacctccagagaggcaacagacaagcagctaccgcagatgtcaacacacaaggcgttcttccaggcatggtctggcaggacagagatgtgtaccttcaggggcccatctgggcaaagattccacacacggacggacattttcacccctctcccctcatgggtggattcggacttaaacaccctcctccacagattctcatcaagaacaccccggtacctgcgaatccttcgaccaccttcagtgcggcaaagtttgcttccttcatcacacagtactccacgggacaggccagcgtggagatcgagtgggagctgcagaaggaaaacagcaaacgctggaatcccgaaattcagtacacttccaactacaacaagtctgttaatgtggactttactgtggacactaatggcgtgtattcagagcctcgccccattggcaccagatacctgactcgtaatctgtaa

SEQ ID NO: 4317 - DNA, 2208 bp, synthetic construct
  misc_feature 1..2208: note = source = /note="Description of Artificial Sequence: Synthetic polynucleotide"
  source 1..2208: mol_type = other DNA
atggctgccgatggttatcttccagattggctcgaggacactctctctgaaggaataagacagtggtggaagctcaaacctggcccaccaccgccaaagcccgcagagcggcacaaggacgccagtaggggtcttgtgcttcctgggtacaagtacctcggacccttcaacggactcgacaaaggagagccggtcaacgaggcagacgccgcggccctcgagcacgacaaggcctacgaccggcagctcgacagcggagacaacccgtacctcaagtacaaccacgccgacgcggagtttcaggagcgtcttaaagaagatacgtcttttgggggcaacctcggacgagcagtattccaggcgaaaaagagggttcttgaacctctgggcctggttgaggaacctgttaagacggctccgggaaaaaagaggccggtagagcactctcctgtggagccagactcctcctcgggaaccggaaaggcgggccagcagcctgcaagaaaaagattgaattttggtcagactggagacgcagactcagtacctgacccccagcctctcggacagccaccagcagccccctctggtctgggaactaatacgatggctacaggcagtggcgcaccaatggcagacaataacgagggcgccgacggagtgggtaattcctcgggaaattggcattgcgattccacatggatgggcgacagagtcatcaccaccagcacccgaacctgggccctgcccacctacaacaaccacctctacaaacaaatttccagccaatcaggagcctcgaacgacaatcactactttggctacagcaccccttgggggtattttgacttcaacagattccactgccacttttcaccacgtgactggcaaagactcatcaacaacaactggggattccgacccaagagactcaacttcaagctctttaacattcaagtcaaagaggtcacgcagaatgacggtacgacgacgattgccaataaccttaccagcacggttcaggtgtttactgactcggagtaccagctcccgtacgtcctcggctcggcgcatcaaggatgcctcccgccgttcccagcagacgtcttcatggtgccacagtatggatacctcaccctgaacaacgggagtcaggcagtaggacgctcttcattttactgcctggagtactttccttctcagatgctgcgtaccggaaacaactttaccttcagctacacttttgaggacgttcctttccacagcagctacgctcacagccagagtctggaccgtctcatgaatcctctcatcgaccagtacctgtattacttgagcagaacaaacactccaagtggaaccaccacgcagtcaaggcttcagttttctcaggccggagcgagtgacattcgggaccagtctaggaactggcttcctggaccctgttaccgccagcagcgagtatcaaagacatctgcggataacaacaacagtgaatactcgtggactggagctaccaagtaccacctcaatggcagagactctctggtgaatccgggcccggccatggcaagccacaaggacgatgaagaaaagttttttcctcagagcggggttctcatctttgggaagcaaggctcagagaaaacaaatgtggacattgaaaaggtcatgattacagacgaagaggaaatcaggacaaccaatcccgtggctacggagcagtatggttctgtatctaccaacctccagagaggcaacaggcaagcagctaccgcagatgtcaacacacaaggcgttcttccaggcatggtctggcaggacagagatgtgtaccttcaggggcccatctgggcaaagattccacacacggacggacattttcacccctctcccctcatgggtggattcggacttaaacaccctcctccacagattctcatcaagaacaccccggtacctgcgaatccttcgaccaccttcagtgcggcaaagtttgcttccttcatcacacagtactccacgggacaggtcagcgtggagatcgagtgggagctgcagaaggaaaacagcaaacgctggaatcccgaaattcagtacacttccaactacaacaagtctgttaatgtggactttactgtggacactaatggcgtgtattcagagcctcgccccattggcaccagatacctgactcgtaatctgtaa

SEQ ID NO: 4318 - DNA, 2208 bp, synthetic construct
  misc_feature 1..2208: note = source = /note="Description of Artificial Sequence: Synthetic polynucleotide"
  source 1..2208: mol_type = other DNA
atggctgccgatggttatcttccagattggctcgaggacactctctctgaaggaataagacagtggtggaagctcaaacctggcccaccaccgccaaagcccgcagagcggcacaaggacgccagtaggggtcttgtgcttcctgggtacaagtacctcggacccttcaacggactcgacaaaggagagccggtcaacgaggcagacgccgcggccctcgagcacgacaaggcctacgaccggcagctcgacagcggagacaacccgtacctcaagtacaaccacgccgacgcggagtttcaggagcgtcttaaagaagatacgccttttgggggcaacctcggacgagcagtattccaggcgaaaaagagggttcttgaacctctgggcctggttgaggagcctgttaagacggctccgggaaaaaagaggccggtagagcactctcctgtggagccagactcctcctcgggaaccggaaaagcgggccagcggcctgcaagaaaaagattgaattttggtcagactggagacgcagactccgtacctgacccccagcctctcggacagccaccagcagcccccacaagtttgggatctactacaatggctacaggcagtggcgcaccaatggcagacaataacgagggtgccgatggagtgggtaattcctcaggaaattggcattgcgattcccaatggctgggcgacagagtcatcaccaccagcacccgaacctgggccctgcccacctacaacaaccacctctacaagcaaatccccagccaatcaggagcatcgaacgacaaccactactttggctacagcaccccttgggggtattttgacttcaacagattccactgtcacttctccccacgtgactggcaaagactcatcaacaacaactggggattccgacccaagagactcaacttcaagctctttaacattcaagtcaaagaggtcacgcagaatgacggtacgacgacgattgccaataaccttaccagcacggttcaggtgtttactgactcggagtaccagctcccgtacgtcctcggctcggcgcatcaaggatgcctcccgccgttcccagcagacgtcttcatggtgccacagtatggatacctcaccctgaacaacgggagtcaggcagtaggacgctcttcattttactgcctggagtactttccttctcagatgctgcgtaccggaaacaactttaccttcagctacacttttgaggacgttcctttccacagcagctacgctcacagccagagtctggaccgtctcatgaatcctctcatcgaccagtacctgtattacttgagcagaacaaacactccaagtggaaccaccacgcagtcaaggcttcagttttctcaggccggagcgagtgacattcgggaccagtctaggaactggcttcctggaccctgttaccgccagcagcgagtatcaaagacatctgcggataacaacaacagtgaatactcgtggactggagctaccaagtaccacctcaatggcagagactctctggtgaatccgggcccggccatggcaagccacaaggacgatgaagaaaagttttttcctcagagcggggttctcatctttgggaagcaaggctcagagaaaacaaatgtggacattgaaaaggtcatgattacagacgaagaggaaatcaggacaaccaatcccgtggctacggagcagtatggttctgtatctaccaacctccagagaggcaacagacaagcagctaccgcagatgtcaacacacaaggcgttcttccaggcatggtctggcaggacagagatgtgtaccttcaggggcccatctgggcaaagattccacacacggacggacattttcacccctctcccctcatgggtggattcggacttaaacaccctcctccacagattctcatcaagaacaccccggtacctgcgaatccttcgaccaccttcagtgcggcaaagtttgcttccttcatcacacagtactccacgggacaggccagcgtggagatcgagtgggagctgcagaaggaaaacagcaaacgctggaatcccgaaattcagtacacttccaactacaacaagtctgttaatgtggactttactgtggacactaatggcgtgtattcagagcctcgccccattggcaccagatacctgactcgtaatctgtaa

SEQ ID NO: 4319 - DNA, 2208 bp, synthetic construct
  misc_feature 1..2208: note = source = /note="Description of Artificial Sequence: Synthetic polynucleotide"
  source 1..2208: mol_type = other DNA
atggctgccgatggttatcttccagattggctcgaggacactctctctgaaggaataagacagtggtggaagctcaaacctggcccaccaccgccaaagcccgcagagcggcacaaggacgacagtaggggtcttgtgcttcctgggtacaagtacctcggacccttcaacggactcgacaaaggagagccggtcaacgaggcagacgccgcggccctcgagcacgacaaggcctacgaccggcagctcgacagcggagacaacccgtacctcaagtacaaccacgccgacgcggagtttcaggagcgtcttaaagaagatacgtcttttgggggcaacctcggacgagcagtattccaggcgaaaaagagggttcttgaacctctgggcctggttgaggagcctgttaagacggctccgggaaaaaagaggccggtagagcactctcctgtggagccagactcctcctcgggaaccggaaaagcgggccagcagcctgcaagaaaaagattgaattttggtcagactggagacgcagactccgtacctgacccccagcctctcggacagccaccagcagcccccacaagtttgggatctactacaatggctacaggcagtggcgcaccaatggcagacaataacgagggtgccgatggagtgggtaattcctcaggaaattggcattgcgattccacatggatgggcgacagagtcatcaccaccagcacccgaacctgggccctgcccacctacaacaaccacctctacaaacaaatttccagccaatcaggagcctcgaacgacaatcactactttggctacagcaccccttgggggtattttgacttcaacagattccactgccacttttcaccacgtgactggcaaagactcatcaacaacaactggggattccgacccaagagactcaacttcaagctctttaacattcaagtcaaagaggtcacgcagaatgacggtacgacgacgattgccaataaccttaccagcacggttcaggtgtttactgactcggagtaccagctcccgtacgtcctcggctcggcgcatcaaggatgcctcccgccgttcccagcagacgtcttcatggtgccacagtatggatacctcaccctgaacaacgggagtcaggcagtaggacgctcttcattttactgcctggagtactttccttctcagatgctgcgtaccggaaacaactttaccttcagctacacttttgaggacgttcctttccacagcagctacgctcacagccagagtctggaccgtctcatgaatcctctcaccgaccagtacctgtattacttgagcagaacaaacactccaagtggaaccaccacgcagtcaaggcttcagttttctcaggccggagcgagtgacattcgggaccagtctaggaactggcttcctggaccctgttaccgccagcagcgagtatcaaagacatctgcggataacaacaacagtgaatactcgtggactggagctaccaagtaccacctcaatggcagagactctctggtgaatccgggcccggccatggcaagccacaaggacgatgaagaaaagttttttcctcagagcggggttctcatctttgggaagcaaggctcagagaaaacaaatgtggacattgaaaaggtcatgattacagacgaagaggaaatcaggacaaccaatcccgtggctacggagcagtatggttctgtatctaccaacctccagagaggcaacagacaagcagctaccgcagatgtcaacacacaaggcgttcttccaggcatggtctggcaggacagagatgtgtaccttcaggggcccatctgggcaaagattccacacacggacggacattttcacccctctcccctcatgggtggattcggacttaaacaccctcctccacagattctcatcaagaacaccccggtacctgcgaatccttcgaccaccttcagtgcggcaaagtttgcttccttcatcacacagtactccacgggacaggtcagcgtggagatcgagtgggagctgcagaaggaaaacagcaaacgctggaatcccgaaattcagtacacttccaactacaacaagtctgttaatgtggactttactgtggacactaatggcgtgtattcagagcctcgccccattggcaccagatacctgactcgtaatctgtaa

SEQ ID NO: 4320 - DNA, 2208 bp, synthetic construct
  misc_feature 1..2208: note = source = /note="Description of Artificial Sequence: Synthetic polynucleotide"
  source 1..2208: mol_type = other DNA
atggctgccgatggttatcttccagattggctcgaggacactctctctgaaggaataagacagtggtggaagctcaaacctggcccaccaccaccaaagcccgcagagcggcataaggacgacagcaggggtcttgtgcttcctgggtacaagtacctcggacccttcaacggactcgacaagggagagccggtcaacgaggcagacgccgcggccctcgagcacgacaaagcctacgaccggcagctcgacagcggagacaacccgtacctcaagtacaaccacgccgacgcggagtttcaggagcgccttaaagaagatacgtcttttgggggcaacctcggacgagcagtcttccaggcgaaaaagagggttcttgaacctctgggcctggttgaggaacctgttaagacggctccgggaaaaaagaggccggtagagcactctcctgtggagccagactcctcctcgggaaccggaaaggcgggccagcagcctgcaagaaaaagattgaattttggtcagactggagacgcagactcagtacctgacccccagcctctcggacagccaccagcagccccctctggtctgggaactaatacgatggctacaggcagtggcgcaccaatggcagacaataacgagggcgccgacggagtgggtaattcctcgggaaattggcattgcgattccacatggatgggcgacagagtcatcaccaccagcacccgaacctgggccctgcccacctacaacaaccacctctacaaacaaatttccagccaatcaggagcctcgaacgacaatcactactttggctacagcaccccttgggggtattttgacttcaacagattccactgccacttttcaccacgtgactggcaaagactcatcaacaacaactggggattccgacccaagagactcaacttcaagctctttaacattcaagtcaaagaggtcacgcagaatgacggtacgacgacgattgccaataaccttaccagcacggttcaggtgtttactgactcggagtaccagctcccgtacgtcctcggctcggcgcatcaaggatgcctcccgccgttcccagcagacgtcttcatggtgccacagtatggatacctcaccctgaacaacgggagtcaggcagtaggacgctcttcattttactgcctggagtactttccttctcagatgctgcgtaccggaaacaactttaccttcagctacacttttgaggacgttcctttccacagcagctacgctcacagccagagtctggaccgtctcatgaatcctctcatcgaccagtacctgtattacttgagcagaacaaacactccaagtggaaccaccgcgcagtcaaggcttcagttttctcaggccggagcgagtgacattcgggaccagtctaggaactggcttcctggaccctgttaccgccagcagcgagtatcaaagacatctgcggataacaacaacagtgaatactcgtggactggagctaccaagtaccacctcaatggcagagactctctggtgaatccgggcccggccatggcaagccacaaggacgatgaagaaaagttttttcctcagagcggggttctcatctttgggaagcaaggctcagagaaaacaaatgtggacattgaaaaggtcatgattacagacgaagaggaaatcaggacaaccaatcccgtggctacggagcagtatggttctgtatctaccaacctccagagaggcaacagacaagcagctaccgcagatgtcaacacacaaggcgttcttccaggcatggtctggcaggacagagatgtgtaccttcaggggcccatctgggcaaagattccacacacggacggacattttcacccctctcccctcatgggtggattcggacttaaacaccctcctccacagattctcatcaagaacaccccggtacctgcgaatccttcgaccaccttcagtgcggcaaagtttgcttccttcatcacacagtactccacgggacaggtcagcgtggagatcgagtgggagctgcagaaggaaaacagcaaacgctggaatcccgaaattcagtacacttccaactacaacaagtctgttaatgtggactttactgtggacactaatggcgtgtattcagagcctcgccccattggcaccagatacctgactcgtaatctgtaa

SEQ ID NO: 4321 - DNA, 2208 bp, synthetic construct
  misc_feature 1..2208: note = source = /note="Description of Artificial Sequence: Synthetic polynucleotide"
  source 1..2208: mol_type = other DNA
atggctgccgatggttatcttccagattggctcgaggacactctctctgaaggaataagacagtggtggaagctcaaacctggcccaccaccaccaaagcccgcagagcggcataaggacgacagcaggggtcttgtgcttcctgggtacaagtacctcggacccttcaacggactcgacaagggagagccggtcaacgaggcagacgccgcggccctcgagcacgacaaagcctacgaccggcagctcgacagcggagacaacccgtacctcaagtacaaccacgccgacgcggagtttcaggagcgccttaaagaagatacgtcttttgggggcaacctcggacgagcagtcttccaggcgaaaaagagggttcttgaacctctgggcctggttgaggaacctgttaagacggctccgggaaaaaagaggccggtagagcactctcctgtggagccagactcctcctcgggaaccggaaaggcgggccagcagcctgcaagaaaaagattgaattttggtcagactggagacgcagactcagtacctgacccccagcctctcggacagccaccagcagccccctctggtctgggaactaatacgatggctacaggcagtggcgcaccaatggcagacaataacgagggcgccgacggagtgggtaattcctcgggaaattggcattgcgattccacatggatgggcgacagagtcatcaccaccagcacccgaacctgggccctgcccacctacaacaaccacctctacaaacaaatttccagccaatcaggagcctcgaacggcaatcactactttggctacagcaccccttgggggtattttgacttcaacagattccactgccacttttcaccacgtgactggcaaagactcatcaacaacaactggggattccgacccaagagactcaacttcaagctctttaacattcaagtcaaagaggtcacgcagaatgacggtacgacgacgattgccaataaccttaccagcacggttcaggtgtttactgactcggagtaccagctcccgtacgtcctcggctcggcgcatcaaggatgcctcccgccgttcccagcagacgtcttcatggtgccacagtatggatacctcaccctgaacaacgggagtcaggcagtaggacgctcttcattttactgcctggagtactttccttctcagatgctgcgtaccggaaacaactttaccttcagctacacttttgaggacgttcctttccacagcagctacgctcacagccagagtctggaccgtctcatgaatcctctcatcgaccagtacctgtattacttgagcagaacaaacactccaagtggaaccaccacgcagtcaaggcttcagttttctcaggccggagcgagtgacattcgggaccagtctaggaactggcttcctggaccctgttaccgccagcagcgagtatcaaagacatctgcggataacaacaacagtgaatactcgtggactggagctaccaagtaccacctcaatggcagagactctctggtgaatccgggcccggccatggcaagccacaaggacgatgaagaaaagttttttcctcagagcggggttctcatctttgggaagcaaggctcagagaaaacaaatgtggacattgaaaaggtcatgattacagacgaagaggaaatcaggacaaccaatcccgtggctacggagcagtatggttctgtatctaccaacctccagagaggcaacagacaagcagctaccgcagatgtcaacacacaaggcgttcttccaggcatggtctggcaggacagagatgtgtaccttcaggggcccatctgggcaaagattccacacacggacggacattttcacccctctcccctcatgggtggattcggacttaaacaccctcctccacagattctcatcaagaacaccccggtacctgcgaatccttcgaccaccttcagtgcggcaaagtttgcttccttcatcacacagtactccacgggacaggtcagcgtggagatcgagtgggagctgcagaaggaaaacagcaaacgctggaatcccgaaattcagtacacttccaactacaacaagtctgttaatgtggactttactgtggacactaatggcgtgtattcagagcctcgccccattggcaccagatacctgactcgtaatctgtaa

SEQ ID NO: 4322 - DNA, 2208 bp, synthetic construct
  misc_feature 1..2208: note = source = /note="Description of Artificial Sequence: Synthetic polynucleotide"
  source 1..2208: mol_type = other DNA
atggctgccgatggttatcttccagattggctcgaggacactctctctgaaggaataagacagtggtggaagctcaaacctggcccaccaccaccaaagcccgcagagcggcataaggacgacagcaggggtcttgtgcttcctgggtacaagtacctcggacccttcaacggactcgacaagggagagccggtcaacgaggcagacgccgcggccctcgagcacgacaaagcctacgaccggcagctcgacagcggagacaacccgtacctcaagtacaaccacgccgacgcggagtttcaggagcgccttaaagaagatacgtcttttgggggcaacctcggacgagcagtcttccaggcgaaaaagagggttcttgaacctctgggcctggttgaggaacctgttaagacggctccgggaaaaaagaggccggtagagcactctcctgtggagccagactcctcctcgggaaccggaaaggcgggccagcagcctgcaagaaaaagattgaattttggtcagactggagacgcagactcagtacctgacccccagcctctcggacagccaccagcagccccctctggtctgggaactaatacgatggctacaggcagtggcgcaccaatggcagacaataacgagggcgccgacggagtgggtaattcctcgggaaattggcattgcgattccacatggatgggcgacagagtcatcaccaccagcacccgaacctgggccctgcccacctacaacaaccacctctacaaacaaatttccagccaatcaggagcctcgaacgacaatcactactttggctacagcaccccttgggggtattttgacttcaacagattccactgccacttttcaccacgtgactggcaaagactcatcaacaacaactggggattccgacccaagagactcaacttcaagctctttaacattcaagtcaaagaggtcacgcagaatgacggtacgacgacgattgccaataaccttaccagcacggttcaggtgtttactgactcggagtaccagctcccgtacgtcctcggctcggcgcatcaaggatgcctcccgccgttcccagcagacgtcttcatggtgccacagtatggatacctcaccctgaacaacgggagtcaggcagtaggacgctcttcattttactgcctggagtactttccttctcagatgctgcgtaccggaaacaactttaccttcagctacacttttgaggacgttcctttccacagcagctacgctcacagccagagtctggaccgtctcatgaatcctctcatcgaccagtacctgtattacttgagcagaacaaacactccaagtggaaccaccacgcagtcaaggcttcagttttctcaggccggagcgagtgacattcgggaccagtctaggaactggcttcctggaccctgttaccgccagcagcgagtatcaaagacatctgcggataacaacaacagtgaatactcgtggactggagctaccaagtaccacctcaatggcagagactctctggtgaatccgggcccggccatggcaagccacaaggacgatgaagaaaagttttttcctcagagcggggttctcatctttgggaagcaaggctcagagaaaacaaatgtggacattgaaagggtcatgattacagacgaagaggaaatcaggacaaccaatcccgtggctacggagcagtatggttctgtatctaccaacctccagagaggcaacagacaagcagctaccgcagatgtcaacacacaaggcgttcttccaggcatggtctggcaggacagagatgtgtaccttcaggggcccatctgggcaaagattccacacacggacggacattttcacccctctcccctcatgggtggattcggacttaaacaccctcctccacagattctcatcaagaacaccccggtacctgcgaatccttcgaccaccttcagtgcggcaaagtttgcttccttcatcacacagtactccacgggacaggtcagcgtggagatcgagtgggagctgcagaaggaaaacagcaaacgctggaatcccgaaattcagtacacttccaactacaacaagtctgttaatgtggactttactgtggacactaatggcgtgtattcagagcctcgccccattggcaccagatacctgactcgtaatctgtaa

SEQ ID NO: 4323 - DNA, 2208 bp, synthetic construct
  misc_feature 1..2208: note = source = /note="Description of Artificial Sequence: Synthetic polynucleotide"
  source 1..2208: mol_type = other DNA
atggctgccgatggttatcttccagattggctcgaggacactctctctgaaggaataagacagtggtggaagctcaaacctggcccaccaccaccaaagcccgcagagcggcataaggacgacagcaggggtcttgtgcttcctgggtacaagtacctcggacccttcaacggactcgacaagggagagccggtcaacgaggcagacgccgcggccctcgagcacgacaaagcctacgaccggcagctcgacagcggagacaacccgtacctcaagtacaaccacgccgacgcggagtttcaggagcgccttaaagaagatacgtcttttgggggcaacctcggacgagcagtcttccaggcgaaaaagagggttcttgaacctctgggcctggttgaggaacctgttaagacggctccgggaaaaaagaggccggtagagcactctcctgtggagccagactcctcctcgggaaccggaaaggcgggccagcagcctgcaagaaaaagattgaattttggtcagactggagacgcagactcagtacctgacccccagcctctcggacagccaccagcagccccctctggtctgggaactaatacgatggctacaggcagtggcgcaccaatggcagacaataacgagggcgccgacggagtgggtaattcctcgggaaattggcattgcgattccacatggatgggcgacagagtcatcaccaccagcacccgaacctgggccctgcccacctacaacaaccacctctacaaacaaatttccagccaatcaggagcctcgaacgacaatcactgctttggctacagcaccccttgggggtattttgacttcaacagattccactgccacttttcaccacgtgactggcaaagactcatcaacaacaactggggattccgacccaagagactcaacttcaagctctttaacattcaagtcaaagaggtcacgcagaatgacggtacgacgacgattgccaataaccttaccagcacggttcaggtgtttactgactcggagtaccagctcccgtacgtcctcggctcggcgcatcaaggatgcctcccgccgttcccagcagacgtcttcatggtgccacagtatggatacctcaccctgaacaacgggagtcaggcagtaggacgctcttcattttactgcctggagtactttccttctcagatgctgcgtaccggaaacaactttaccttcagctacacttttgaggacgttcctttccacagcagctacgctcacagccagagtctggaccgtctcatgaatcctctcatcgaccagtacctgtattacttgagcagaacaaacactccaagtggaaccaccacgcagtcaaggcttcagttttctcaggccggagcgagtgacattcgggaccagtctaggaactggcttcctggaccctgttaccgccagcagcgagtatcaaagacatctgcggataacaacaacagtgaatactcgtggactggagctaccaagtaccacctcaatggcagagactctctggtgaatccgggcccggccatggcaagccacaaggacgatgaagaaaagttttttcctcagagcggggttctcatctttgggaagcaaggctcagagaaaacaaatgtggacattgaaaaggtcatgattacagacgaagaggaaatcaggacaaccaatcccgtggctacggagcagtatggttctgtatctaccaacctccagagaggcaacagacaagcagctaccgcagatgtcaacacacaaggcgttcttccaggcatggtctggcaggacagagatgtgtaccttcaggggcccatctgggcaaagattccacacacggacggacattttcacccctctcccctcatgggtggattcggacttaaacaccctcctccacagattctcatcaagaacaccccggtacctgcgaatccttcgaccaccttcagtgcggcaaagtttgcttccttcatcacacagtactccacgggacaggtcagcgtggagatcgagtgggagctgcagaaggaaaacagcaaacgctggaatcccgaaattcagtacacttccaactacaacaagtctgttaatgtggactttactgtggacactaatggcgtgtattcagagcctcgccccattggcaccagatacctgactcgtaatctgtaa

SEQ ID NO: 4324 - DNA, 2208 bp, synthetic construct
  misc_feature 1..2208: note = source = /note="Description of Artificial Sequence: Synthetic polynucleotide"
  source 1..2208: mol_type = other DNA
atggctgccgatggttatcttccagattggctcgaggacactctctctgaaggaataagacagtggtggaagctcaaacctggcccaccaccaccaaagcccgcagagcggcataaggacgacagcaggggtcttgtgcttcctgggtacaagtacctcggacccttcaacggactcgacaagggagagccggtcaacgaggcagacgccgcggccctcgagcacgacaaagcctacgaccggcagctcgacagcggagacaacccgtacctcaagtacaaccacgccgacgcggagtttcaggagcgccttaaagaagatacgtcttttgggggcaacctcggacgagcagtcttccaggcgaaaaagagggttcttgaacctctgggcctggttgaggaacctgttaagacggctccgggaaaaaagaggccggtagagcactctcctgtggagccagactcctcctcgggaaccggaaaggcgggccagcagcctgcaagaaaaagattgaattttggtcagactggagacgcagactcagtacctgacccccagcctctcggacagccaccagcagccccctctggtctgggaactaatacgatggctacaggcagtggcgcaccaatggcagacaataacgagggcgccgacggagtgggtaattcctcgggaaattggcattgcgattccacatggatgggcgacagagtcatcaccaccagcacccgaacctgggccctgcccacctacaacaaccacctctacaaacaaatttccagccaatcaggagcctcgaacgacaatcactactttggctacagcaccccttgggggtattttgacttcaacagattccactgccacttttcaccacgtgactggcaaagactcatcaacaacaactggggattccgacccaagagactcaacttcaagctctttaacattcaagtcaaagaggtcacgcagaatgacggtacgacgacgattgccaataaccttaccagcacggttcaggtgtttactgactcggagtaccagctcccgtacgtcctcggctcggcgcatcaaggatgcctcccgccgttcccagcagacgtcttcatggtgccacagtatggatacctcaccctgaacaacgggagtcaggcagtaggacgctcttcattttactgcctggagtactttccttctcagatgctgcgtaccggaaacaactttaccttcagctacacttttgaggacgttcctttccacagcagctacgctcacagccagagtctggaccgtctcatgaatcctctcatcgaccagtacctgtattacttgagcagaacaaacactccaagtggaaccaccacgcagtcaaggcttcagttttctcaggccggagcgagtgacattcgggaccagtctaggaactggcttcctggaccctgttaccgccagcagcgagtatcaaagacatctgcggataacaacaacagtgaatactcgtggactggagctaccaagtaccacctcaatggcagagactctctggtgaatccgggcccggccatggcaagccacaaggacgatgaagaaaagttttttcctcagagcggggttctcatctttgggaagcaaggctcagagaaaacaaatgtggacattgaaaaggtcatgattacagacgaagaggaaatcaggacaaccaatcccgtggctacggagcagtatggttctgtatctaccaacctccagagaggcaacagacaagcagctaccgcagatgtcaacacacaaggcgttcttccaggcatggtctggcaggacagagatgtgtaccttcaggggcccatctgggcaaagattccacacacggacggacattttcacccctctcccctcatgggtggattcggacttaaacaccctcctccacagattctcatcaagaacaccccggtacctgcgaatccttcgaccaccttcagtgcggcaaagtttgcttccttcatcacacagtactccacgggacaggtcagcgtggagatcgagtgggagctgcagaaggaaaacagcaaacgctggaatcccgaaattcagtacacttccaactacaacaagtctgttaatgcggactttactgtggacactaatggcgtgtattcagagcctcgccccattggcaccagatacctgactcgtaatctgtaa

SEQ ID NO: 4325 - DNA, 2208 bp, synthetic construct
  misc_feature 1..2208: note = source = /note="Description of Artificial Sequence: Synthetic polynucleotide"
  source 1..2208: mol_type = other DNA
atggctgccgatggttatcttccagattggctcgaggacactctctctgaaggaataagacagtggtggaagctcaaacctggcccaccaccaccaaagcccgcagagcggcatagggacgacagcaggggtcttgtgcttcctgggtacaagtacctcggacccttcaacggactcgacaagggagagccggtcaacgaggcagacgccgcggccctcgagcacgacaaagcctacgaccggcagctcgacagcggagacaacccgtacctcaagtacaaccacgccgacgcggagtttcaggagcgccttaaagaagatacgtcttttgggggcaacctcggacgagcagtcttccaggcgaaaaagagggttcttgaacctctgggcctggttgaggaacctgttaagacggctccgggaaaaaagaggccggtagagcactctcctgtggagccagactcctcctcgggaaccggaaaggcgggccagcagcctgcaagaaaaagattgaattttggtcagactggagacgcagactcagtacctgacccccagcctctcggacagccaccagcagccccctctggtctgggaactaatacgatggctacaggcagtggcgcaccaatggcagacaataacgagggcgccgacggagtgggtaattcctcgggaaattggcattgcgattccacatggatgggcgacagagtcatcaccaccagcacccgaacctgggccctgcccacctacaacaaccacctctacaaacaaatttccagccaatcaggagcctcgaacggcaatcactactttggctacagcaccccttgggggtattttgacttcaacagattccactgccacttttcaccacgtgactggcaaagactcatcaacaacaactggggattccgacccaagagactcaacttcaagctctttaacattcaagtcaaagaggtcacgcagaatgacggtacgacgacgattgccaataaccttaccagcacggttcaggtgtttactgactcggagtaccagctcccgtacgtcctcggctcggcgcatcaaggatgcctcccgccgttcccagcagacgtcttcatggtgccacagtatggatacctcaccctgaacaacgggagtcaggcagtaggacgctcttcattttactgcctggagtactttccttctcagatgctgcgtaccggaaacaactttaccttcagctacacttttgaggacgttcctttccacagcagctacgctcacagccagagtctggaccgtctcatgaatcctctcatcgaccagtacctgtattacttgagcagaacaaacactccaagtggaaccaccacgcagtcaaggcttcagttttctcaggccggagcgagtgacattcgggaccagtctaggaactggcttcctggaccctgttaccgccagcagcgagtatcaaagacatctgcggataacaacaacagtgaatactcgtggactggagctaccaagtaccacctcaatggcagagactctctggtgaatccgggcccggccatggcaagccacaaggacgatgaagaaaagttttttcctcagagcggggttctcatctttgggaagcaaggctcagagaaaacaaatgtggacattgaaaaggtcatgattacagacgaagaggaaatcaggacaaccaatcccgtggctacggagcagtatggttctgtatctaccaacctccagaggggcaacagacaagcagctaccgcagatgtcaacacacaaggcgttcttccaggcatggtctggcaggacagagatgtgtaccttcaggggcccatctgggcaaagattccacacacggacggacattttcacccctctcccctcatgggtggattcggacttaaacaccctcctccacagattctcatcaagaacaccccggtacctgcgaatccttcgaccaccttcagtgcggcaaagtttgcttccttcatcacacagtactccacgggacaggtcagcgtggagatcgagtgggagctgcagaaggaaaacagcaaacgctggaatcccgaaattcagtacacttccaactacaacaagtctgttaatgtggactttactgtggacactaatggcgtgtattcagagcctcgccccattggcaccagatacctgactcgtaatctgtaa

SEQ ID NO: 4326 - DNA, 2208 bp, synthetic construct
  misc_feature 1..2208: note = source = /note="Description of Artificial Sequence: Synthetic polynucleotide"
  source 1..2208: mol_type = other DNA
atggctgccgatggttatcttccagattggctcgaggacactctctctgaaggaataagacagtggtggaagctcaaacctggcccaccaccaccaaagcccgcagagcggcataaggacgacagcaggggtcttgtgcttcctgggtacaagtacctcggacccttcaacggactcgacaagggagagccggtcaacgaggcagacgccgcggccctcgagcacgacaaagcctacgaccggcagctcgacagcggagacaacccgtacctcaagtacaaccacgccgacgcggagtttcaggagcgccttaaagaagatacgtcttttgggggcaacctcggacgagcagtcttccaggcgaaaaagagggttcttgaacctctgggcctggttgaggaacctgttaagacggctccgggaaaaaagaggccggtagagcactctcctgtggagccagactcctcctcgggaaccggaaaggcgggccagcagcctgcaagaaaaagattgaattttggtcagactggagacgcagactcagtacctgacccccagcctctcggacagccaccagcagccccctctggtctgggaactaatacgatggctacaggcagtggcgcaccaatggcagacaataacgagggcgccgacggagtgggtaattcctcgggaaattggcattgcgattccacatggatgggcgacagagtcatcaccaccagcacccgaacctgggccctgcccacctacaacaaccacctctacaaacaaatttccagccaatcaggagcctcgaacgacaatcactactttggctacagcaccccttgggggtattttgacttcaacagattccactgccacttttcaccacgtgactggcaaagactcatcaacaacaactggggattccgacccaagagactcaacttcaagctctttaacattcaagtcaaagaggtcacgcagaatgacggtacgacgacgattgccaataaccttaccagcacggttcaggtgtttactgactcggagtaccagctcccgtacgtcctcggctcggcgcatcaaggatgcctcccgccgttcccagcagacgtcttcatggtgccacagtatggatacctcaccctgaacaacgggagtcgggcagtaggacgctcttcattttactgcctggagtactttccttctcagatgctgcgtaccggaaacaactttaccttcagctacacttttgaggacgttcctttccacagcagctacgctcacagccagagtctggaccgtctcatgaatcctctcatcgaccagtacctgtattacttgagcagaacaaacactccaagtggaaccaccacgcagtcaaggcttcagttttctcaggccggagcgagtgacattcgggaccagtctaggaactggcttcctggaccctgttaccgccagcagcgagtatcaaaggcatctgcggataacaacaacagtgaatactcgtggactggagctaccaagtaccacctcaatggcagagactctctggtgaatccgggcccggccatggcaagccacaaggacgatgaagaaaagttttttcctcagagcggggttctcatctttgggaagcaaggctcagagaaaacaaatgtggacattgaaaaggtcatgattacagacgaagaggaaatcaggacaaccaatcccgtggctacggagcagtatggttctgtatctaccaacctccagagaggcaacagacaagcagctaccgcagatgtcaacacacaaggcgttcttccaggcatggtctggcaggacagagatgtgtaccttcaggggcccatctgggcaaagattccacacacggacggacattttcacccctctcccctcatgggtggattcggacttaaacaccctcctccacagattctcatcaagaacaccccggtacctgcgaatccttcgaccaccttcagtgcggcaaagtttgcttccttcatcacacagtactccacgggacaggtcagcgtggagatcgagtgggagctgcagaaggaaaacagcaaacgctggaatcccgaaattcagtacacttccaactacaacaagtctgttaatgtggactttactgtggacactaatggcgtgtattcagagcctcgccccattggcaccagatacctgactcgtaatctgtaa

SEQ ID NO: 4327 - DNA, 2208 bp, synthetic construct
  misc_feature 1..2208: note = source = /note="Description of Artificial Sequence: Synthetic polynucleotide"
  source 1..2208: mol_type = other DNA
atggctgccgatggttatcttccagattggctcgaggacactctctctgaaggaataagacagtggtggaagctcaaacctggcccaccaccaccaaagcccgcagagcggcatagggacgacagcaggggtcttgtgcttcctgggtacaagtacctcggacccttcaacggactcgacaagggagagccggtcaacgaggcagacgccgcggccctcgagcacgacaaagcctacgaccggcagctcgacagcggagacaacccgtacctcaagtacaaccacgccgacgcggagtttcaggagcgccttaaagaagatacgtcttttgggggcaacctcggacgagcagtcttccaggcgaaaaagagggttcttgaacctctgggcctggttgaggaacctgttaagacggctccgggaaaaaagaggccggtagagcactctcctgtggagccagactcctcctcgggaaccggaaaggcgggccagcagcctgcaagaaaaagattgaattttggtcagactggagacgcagactcagtacctgacccccagcctctcggacagccaccagcagccccctctggtctgggaactaatacgatggctacaggcagtggcgcaccaatggcagacaataacgagggcgccgacggagtgggtaattcctcgggaaattggcattgcgattccacatggatgggcgacagagtcatcaccaccagcacccgaacctgggccctgcccacctacaacaaccacctctacaaacaaatttccagccaatcaggagcctcgaacggcaatcactactttggctacagcaccccttgggggtattttgacttcaacagattccactgccacttttcaccacgtgactggcaaagactcatcaacaacaactggggattccgacccaagagactcaacttcaagctctttaacattcaagtcaaagaggtcacgcagaatgacggtacgacgacgattgccaataaccttaccagcacggttcaggtgtttactgactcggagtaccagctcccgtacgtcctcggctcggcgcatcaaggatgcctcccgccgttcccagcagacgtcttcatggtgccacagtatggatacctcaccctgaacaacgggagtcaggcagtaggacgctcttcattttactgcctggagtactttccttctcagatgctgcgtaccggaaacaactttaccttcagctacacttttgaggacgttcctttccacagcagctacgctcacagccagagtctggaccgtctcatgaatcctctcatcgaccagtacctgtattacttgagcagaacaaacactccaagtggaaccaccacgcagtcaaggcttcagttttctcaggccggagcgagtggcattcgggaccagtctaggaactggcttcctggaccctgttaccgccagcagcgagtatcaaagacatctgcggataacaacaacagtgaatactcgtggactggagctaccaagtaccacctcaatggcagagactctctggtgaatccgggcccggccatggcaagccacaaggacgatgaagaaaagttttttcctcagagcggggttctcatctttgggaagcaaggctcagagaaaacaaatgtggacattgaaaaggtcatgattacagacgaagaggaaatcaggacaaccaatcccgtggctacggagcagtatggttctgtatctaccaacctccagaggggcaacagacaagcagctaccgcagatgtcaacacacaaggcgttcttccaggcatggtctggcaggacagagatgtgtaccttcaggggcccatctgggcaaagattccacacacggacggacattttcacccctctcccctcatgggtggattcggacttaaacaccctcctccacagattctcatcaagaacaccccggtacctgcgaatccttcgaccaccttcagtgcggcaaagtttgcttccttcatcacacagtactccacgggacaggtcagcgtggagatcgagtgggagctgcagaaggaaaacagcaaacgctggaatcccgaaattcagtacacttccaactacaacaagtctgttaatgtggactttactgtggacactaatggcgtgtattcagagcctcgccccattggcaccagatacctgactcgtaatctgtaa

SEQ ID NO: 4328 - DNA, 2208 bp, synthetic construct
  misc_feature 1..2208: note = source = /note="Description of Artificial Sequence: Synthetic polynucleotide"
  source 1..2208: mol_type = other DNA
atggctgccgatggttatcttccagattggctcgaggacactctctctgaaggaataagacagtggtggaagctcaaacctggcccaccaccaccaaagcccgcagagcggcatagggacgacagcaggggtcttgtgcttcctgggtacaagtacctcggacccttcaacggactcgacaagggagagccggtcaacgaggcagacgccgcggccctcgagcacgacaaagcctacgaccggcagctcgacagcggagacaacccgtacctcaagtacaaccacgccgacgcggagtttcaggagcgccttaaagaagatacgtcttttgggggcaacctcggacgagcagtcttccaggcgaaaaagagggttcttgaacctctgggcctggttgaggaacctgttaagacggctccgggaaaaaagaggccggtagagcactctcctgtggagccagactcctcctcgggaaccggaaaggcgggccagcagcctgcaagaaaaagattgaattttggtcagactggagacgcagactcagtacctgacccccagcctctcggacagccaccagcagccccctctggtctgggaactaatacgatggctacaggcagtggcgcaccaatggcagacaataacgagggcgccgacggagtgggtaattcctcgggaaattggcattgcgattccacatggatgggcgacagagtcatcaccaccagcacccgaacctgggccctgcccacctacaacaaccacctctacaaacaaatttccagccaatcaggagcctcgaacggcaatcactactttggctacagcaccccttgggggtattttgacttcaacagattccactgccacttttcaccacgtgactggcaaagactcatcaacaacaactggggattccgacccaagagactcaacttcaagctctttaacattcaagtcaaagaggtcacgcagaatgacggtacgacgacgattgccaataaccttaccagcacggttcaggtgtttactgactcggagtaccagctcccgtacgtcctcggctcggcgcatcaaggatgcctcccgccgttcccagcagacgtcttcatggtgccacagtatggatacctcaccctgaacaacgggagtcaggcagtaggacgctcttcattttactgcctggagtactttccttctcagatgctgcgtaccggaaacaactttaccttcagctacacttttgaggacgttcctttccacagcaactacgctcacagccagagtctggaccgtctcatgaatcctctcatcgaccagtacctgtattacttgagcagaacaaacactccaagtggaaccaccacgcagtcaaggcttcagttttctcaggccggagcgagtgacattcgggaccagtctaggaactggcttcctggaccctgttaccgccagcagcgagtatcaaagacatctgcggataacaacaacagtgaatactcgtggactggagctaccaagtaccacctcaatggcagagactctctggtgaatccgggcccggccatggcaagccacaaggacgatgaagaaaagttttttcctcagagcggggttctcatctttgggaagcaaggctcagagaaaacaaatgtggacattgaaaaggtcatgattacagacgaagaggaaatcaggacaaccaatcccgtggctacggagcagtatggttctgtatctaccaacctccagaggggcaacagacaagcagctaccgcagatgtcaacacacaaggcgttcttccaggcatggtctggcaggacagagatgtgtaccttcaggggcccatctgggcaaagattccacacacggacggacattttcacccctctcccctcatgggtggattcggacttaaacaccctcctccacagattctcatcaagaacaccccggtacctgcgaatccttcgaccaccttcagtgcggcaaagtttgcttccttcatcacacagtactccacgggacaggtcagcgtggagatcgagtgggagctgcagaaggaaaacagcaaacgctggaatcccgaaattcagtacacttccaactacaacaagtctgttaatgtggactttactgtggacactaatggcgtgtattcagagcctcgccccattggcaccagatacctgactcgtaatctgtaa

SEQ ID NO: 4329 - DNA, 2208 bp, synthetic construct
  misc_feature 1..2208: note = source = /note="Description of Artificial Sequence: Synthetic polynucleotide"
  source 1..2208: mol_type = other DNA
atggctgccgatggttatcttccagattggctcgaggacactctctctgaaggaataagacagtggtggaagctcaaacctggcccaccaccaccaaagcccgcagagcggcataaggacgacagcaggggtcttgtgcttcctgggtacaagtacctcggacccttcaacggactcgacaagggagagccggtcaacgaggcagacgccgcggccctcgagcacgacaaagcctacgaccggcagctcgacagcggagacaacccgtacctcaagtacaaccacgccgacgcggagtttcaggagcgccttaaagaagatacgtcttttgggggcaacctcggacgagcagtcttccaggcgaaaaagagggttcttgaacctctgggcctggttgaggaacctgttaagacggctccgggaaaaaagaggccggtagagcactctcctgtggagccagactcctcctcgggaaccggaaaggcgggccagcagcctgcaagaaaaagattgaattttggtcagactggagacgcagactcagtacctgacccccagcctctcggacagccaccagcagccccctctggtctgggaactaatacgatggctacaggcagtggcgcaccaatggcagacaataacgagggcgccgacggagtgggtaattcctcgggaaattggcattgcgattccacatggatgggcgacagagtcatcaccaccagcacccgaacctgggccctgcccacctacaacaaccacctctacaaacaaatttccagccaatcaggagcctcgaacgacaatcactactttggctacagcaccccttgggggtattttgacttcaacagattccactgccacttttcaccacgtgactggcaaagactcatcaacaacaactggggattccgacccaagagactcaacttcaagctctttaacattcaagtcaaagaggtcacgcagaatgacggtacgacgacgattgccaataaccttaccagcacggttcaggtgtttactgactcggagtaccagctcccgtacgtcctcggctcggcgcatcaaggatgcctcccgccgttcccagcagacgtcttcatggtgccacagtatggatacctcaccctgaacaacgggagtcaggcagtaggacgctcttcattttactgcctggagtactttccttctcagatgctgcgtaccggaaacaactttaccttcagctacacttttgaggacgttcctttccacagcagctacgctcacagccagagtctggaccgtctcatgaatcctctcatcgaccagtacctgtattacttgagcagaacaaacactccaagtggaaccaccacgcagtcaaggcttcagttttctcaggccggagcgagtgacattcgggaccagtctaggaactggcttcctggaccctgttaccgccagcagcgagtatcaaagacatctgcggataacaacaacagtgaatactcgtggactggagctaccaagtaccacctcaatggcagagactctctggtgaatccgggcccggccatggcaagccacaaggacgatgaagaaaagttttttcctcagagcggggttctcatctttgggaagcaaggctcagagaaaacaaatgtggacattgaaaaggtcatgattacagacgaagaggaaatcaggacaaccaatcccgtggctacggagcagtatggttctgtatctaccaacctccagagaggcaacagacaagcagctaccgcagatgtcaacacacaaggcgttcttccaggcatggtctggcaggacagagatgtgtaccttcaggggcccatctgggcaaagattccacacacggacggacattttcacccctctcccctcatgggtggattcggacttaaacaccctcctccacagattctcatcaagaacaccccggtacctgcgaatccttcgaccaccttcagtgcggcaaagtttgcttccttcatcacacagtactccgcgggacaggtcagcgtggagatcgagtgggagctgcagaaggaaaacagcaaacgctggaatcccgaaattcagtacacttccaactacaacaagtctgttaatgtggactttactgtggacactaatggcgtgtattcagagcctcgccccattggcaccagatacctgactcgtaatctgtaa

SEQ ID NO: 4330 - DNA, 2208 bp, synthetic construct
  misc_feature 1..2208: note = source = /note="Description of Artificial Sequence: Synthetic polynucleotide"
  source 1..2208: mol_type = other DNA
atggctgccgatggttatcttccagattggctcgaggacactctctctgaaggaataagacagtggtggaagctcaaacctggcccaccaccaccaaagcccgcagagcggcataaggacgacagcaggggtcttgtgcttcctgggtacaagtacctcggacccttcaacggactcgacaagggagagccggtcaacgaggcagacgccgcggccctcgagcacgacaaagcctacgaccggcagctcgacagcggagacaacccgtacctcaagtacaaccacgccgacgcggagtttcaggagcgccttaaagaagatacgtcttttgggggcaacctcggacgagcagtcttccaggcgaaaaagagggttcttgaacctctgggcctggttgaggaacctgttaagacggctccgggaaaaaagaggccggtagagcactctcctgtggagccagactcctcctcgggaaccggaaaggcgggccagcagcctgcaagaaaaagattgaattttggtcagactggagacgcagactcagtacctgacccccagcctctcggacagccaccagcagccccctctggtctgggaactaatacgatggctacaggcagtggcgcaccaatggcagacaataacgagggcgccgacggagtgggtaattcctcgggaaattggcattgcgattccacatggatgggcgacagagtcatcaccaccagcacccgaacctgggccctgcccacctacaacaaccacctctacaaacaaatttccagccaatcaggagcctcgaacgacaatcactactttggctacagcaccccttgggggtattttgacttcaacagattccactgccacttttcaccacgtgactggcaaagactcatcaacaacaactggggattccgacccaagagactcaacttcaagctctttaacattcaagtcaaagaggtcacgcagaatgacggtacgacgacgattgccaataaccttaccagcacggttcaggtgtttactgactcggagtaccagctcccgtacgtcctcggctcggcgcatcaaggatgcctcccgccgttcccagcagacgtcttcatggtgccacagtatggatacctcaccctgaacaacgggagtcaggcagtaggacgctcttcattttactgcctggagtactttccttctcagatgctgcgtaccggaaacaactttaccttcagctacacttttgaggacgttcctttccacagcagctacgctcacagccagagtctggaccgtctcatgaatcctctcatcgaccagtacctgtattacttgagcagaacaaacactccaagtggaaccaccacgcagtcaaggcttcagttttctcaggccggagcgagtgacattcgggaccagtctaggaactggcttcctggaccctgttaccgccagcagcgagtatcaaagacatctgcggataacaacaacagtgaatactcgtggactggagctaccaagtaccacctcaatggcagagactctctggtgaatccgggcccggccatggcaagccacaaggacgatgaagaaaagttttttcctcagagcggggttctcatctttgggaagcaaggctcagagaaaacaaatgtggacattgaaaaggtcatgattacagacgaagaggaaatcaggacaaccaatcccgtggctacggagcagtatggttctgtatctaccaacctccagagaggcaacagacaagcagctaccgcagatgtcaacacacaaggcgttcttccaggcatggtctggcaggacagagatgtgtaccttcaggggcccatctgggcaaagattccacacacggacggacattttcacccctctcccctcatgggtggattcggacttaaacaccctcctccacagattctcatcaagaacaccccggtacctgcgaatccttcgaccaccttcagtgcggcaaagtttgcttccttcatcacacagtactccacgggacaggtcagcgtggagatcgagtgggagctgcagaaggaaaacagcaaacgctggaatcccgaaattcagtacacttccaactacaacaagtctgttaatgtggactttactgtggacactgatggcgtgtattcagagcctcgccccattggcaccagatacctgactcgtaatctgtaa

SEQ ID NO: 4331 - DNA, 2208 bp, synthetic construct
  misc_feature 1..2208: note = source = /note="Description of Artificial Sequence: Synthetic polynucleotide"
  source 1..2208: mol_type = other DNA
atggctgccgatggttatcttccagattggctcgaggacactctctctgaaggaataagacagtggtggaagctcaaacctggcccaccaccaccaaagcccgcagagcggcataaggacgacagcaggggtcttgtgcttcctgggtacaagtacctcggacccttcaacggactcgacaagggagagccggtcaacgaggcagacgccgcggccctcgagcacgacaaagcctacgaccggcagctcgacagcggagacaacccgtacctcaagtacaaccacgccgacgcggagtttcaggagcgccttaaagaagatacgtcttttgggggcaacctcggacgagcagtcttccaggcgaaaaagagggttcttgaacctctgggcctggttgaggaacctgttaagacggctccgggaaaaaagaggccggtagagcactctcctgtggagccagactcctcctcgggaaccggaaaggcgggccagcagcctgcaagaaaaagattgaattttggtcagactggagacgcagactcagtacctgacccccagcctctcggacagccaccagcagccccctctggtctgggaactaatacgatggctacaggcagtggcgcaccaatggcagacaataacgagggcgccgacggagtgggtaattcctcgggaaattggcattgcgattccacatggatgggcgacagagtcatcaccaccagcacccgaacctgggccctgcccacctacaacaaccacctctacaaacaaatttccagccaatcaggagcctcgaacgacaatcactactttggctacagcaccccttgggggtattttgacttcaacagattccactgccacttttcaccacgtgactggcaaagactcatcaacaacaactggggattccgacccaagagactcaacttcaagctctttaacattcaagtcaaagaggtcacgcagaatgacggtacgacgacgattgccaataaccttaccagcacggttcaggtgtttactgactcggagtaccagctcccgtacgtcctcggctcggcgcatcaaggatgcctcccgccgttcccagcagacgtcttcatggtgccacagtatggatacctcaccctgaacaacgggagtcaggcagtaggacgctcttcattttactgcctggagtactttccttctcagatgctgcgtaccggaaacaactttaccttcagctacacttttgaggacgttcctttccacagcagctacgctcacagccagagtctggaccgtctcatgaatcctctcatcgaccagtacctgtattacttgagcagaacaaacactccaagtggaaccaccacgcagtcaaggcttcagttttctcaggccggagcgagtgacattcgggaccagtctaggaactggcttcctggaccctgttaccgccagcagcgagtatcaaagacatctgcggataacaacaacagtgaatactcgtggactggagctaccaagtaccacctcaatggcagagactctctggtgaatccgggcccggccatggcaagccacaaggacgatgaagaaaagttttttcctcagagcggggttctcatctttgggaagcaaggctcagagaaaacaaatgtggacattgaaaaggtcatgattacagacgaagaggaaatcaggacaaccaatcccgtggctacggagcagtatggttctgtatctaccaacctccagagaggcaacagacaagcagctaccgcagatgtcaacacacaaggcgttcttccaggcatggtctggcagggcagagatgtgtaccttcaggggcccatctgggcaaagattccacacacggacggacattttcacccctctcccctcatgggtggattcggacttaaacaccctcctccacagattctcatcaagaacaccccggtacctgcgaatccttcgaccaccttcagtgcggcaaagtttgcttccttcatcacacagtactccacgggacaggtcagcgtggagatcgagtgggagctgcagaaggaaaacagcaaacgctggaatcccgaaattcagtacacttccaactacaacaagtctgttaatgtggactttactgtggacactaatggcgtgtattcagagcctcgccccattggcaccagatacctgactcgtaatctgtaa

SEQ ID NO: 4332 - DNA, 2208 bp, synthetic construct
  misc_feature 1..2208: note = source = /note="Description of Artificial Sequence: Synthetic polynucleotide"
  source 1..2208: mol_type = other DNA
atggctgccgatggttatcttccagattggctcgaggacactctctctgaaggaataagacagtggtggaagctcaaacctggcccaccaccaccaaagcccgcagagcggcataaggacgacagcaggggtcttgtgcttcctgggtacaagtacctcggacccttcaacggactcgacaagggagagccggtcaacgaggcagacgccgcggccctcgagcacgacaaagcctacgaccggcagctcgacagcggagacaacccgtacctcaagtacaaccacgccgacgcggagtttcaggagcgccttaaagaagatacgtcttttgggggcaacctcggacgagcagtcttccaggcgaaaaagagggttcttgaacctctgggcctggttgaggaacctgttaagacggctccgggaaaaaaggggccggtagagcactctcctgtggagccagactcctcctcgggaaccggaaaggcgggccagcagcctgcaagaaaaagattgaattttggtcagactggagacgcagactcagtacctgacccccagcctctcggacagccaccagcagccccctctggtctgggaactaatacgatggctacaggcagtggcgcaccaatggcagacaataacgagggcgccgacggagtgggtaattcctcgggaaattggcattgcgattccacatggatgggcgacagagtcatcaccaccagcacccgaacctgggccctgcccacctacaacaaccacctctacaaacaaatttccagccaatcaggagcctcgaacgacaatcactactttggctacagcaccccttgggggtattttgacttcaacagattccactgccacttttcaccacgtgactggcaaagactcatcaacaacaactggggattccgacccaagagactcaacttcaagctctttaacattcaagtcaaagaggtcacgcagaatgacggtacgacgacgattgccaataaccttaccagcacggttcaggtgtttactgactcggagtaccagctcccgtacgtcctcggctcggcgcatcaaggatgcctcccgccgttcccagcagacgtcttcatggtgccacagtatggatacctcaccctgaacaacgggagtcaggcagtaggacgctcttcattttactgcctggagtactttccttctcagatgctgcgtaccggaaacaactttaccttcagctacacttttgaggacgttcctttccacagcagctacgctcacagccagagtctggaccgtctcatgaatcctctcatcgaccagtacctgtattacttgagcagaacaaacactccaagtggaaccaccacgcagtcaaggcttcagttttctcaggccggagcgagtgacattcgggaccagtctaggaactggcttcctggaccctgttaccgccagcagcgagtatcaaagacatctgcggataacaacaacagtgaatactcgtggactggagctaccaagtaccacctcaatggcagagactctctggtgaatccgggcccggccatggcaggccacaaggacgatgaagaaaagttttttcctcagagcggggttctcatctttgggaagcaaggctcagagaaaacaaatgtggacattgaaaaggtcatgattacagacgaagaggaaatcaggacaaccaatcccgtggctacggagcagtatggttctgtatctaccaacctccagagaggcaacagacaagcagctaccgcagatgtcaacacacaaggcgttcttccaggcatggtctggcaggacagagatgtgtaccttcaggggcccatctgggcaaagattccacacacggacggacattttcacccctctcccctcatgggtggattcggacttaaacaccctcctccacagattctcatcaagaacaccccggtacctgcgaatccttcgaccaccttcagtgcggcaaagtttgcttccttcatcacacagtactccacgggacaggtcagcgtggagatcgagtgggagctgcagaaggaaaacagcaaacgctggaatcccgaaattcagtacacttccaactacaacaagtctgttaatgtggactttactgtggacactaatggcgtgtattcagagcctcgccccattggcaccagatacctgactcgtaatctgtaa

SEQ ID NO: 4333 - DNA, 2208 bp, synthetic construct
  misc_feature 1..2208: note = source = /note="Description of Artificial Sequence: Synthetic polynucleotide"
  source 1..2208: mol_type = other DNA
atggctgccgatggttatcttccagattggctcgaggacactctctctgaaggaataagacagtggtggaagctcaaacctggcccaccaccaccaaagcccgcagagcggcataaggacgacagcaggggtcttgtgcttcctgggtacaagtacctcggacccttcaacggactcgacaagggagagccggtcaacgaggcagacgccgcggccctcgagcacgacaaagcctacgaccggcagctcgacagcggagacaacccgtacctcaagtacaaccacgccgacgcggagtttcaggagcgccttaaagaagatacgtcttttgggggcaacctcggacgagcagtcttccaggcgaaaaagagggttcttgaacctctgggcctggttgaggaacctgttaagacggctccgggaaaaaagaggctggtagagcactctcctgtggagccagactcctcctcgggaaccggaaaggcgggccagcagcctgcaagaaaaagattgaattttggtcagactggagacgcagactcagtacctgacccccagcctctcggacagccaccagcagccccctctggtctgggaactaatacgatggctacaggcagtggcgcaccaatggcagacaataacgagggcgccgacggagtgggtaattcctcgggaaattggcattgcgattccacatggatgggcgacagagtcatcaccaccagcacccgaacctgggccctgcccacctacaacaaccacctctacaaacaaatttccagccaatcaggagcctcgaacgacaatcactactttggctacagcaccccttgggggtattttgacttcaacagattccactgccacttttcaccacgtgactggcaaagactcatcaacaacaactggggattccgacccaagagactcaacttcaagctctttaacattcaagtcaaagaggtcacgcagaatgacggtacgacgacgattgccaataaccttaccagcacggttcaggtgtttactgactcggagtaccagctcccgtacgtcctcggctcggcgcatcaaggatgcctcccgccgttcccagcagacgtcttcatggtgccacagtatggatacctcaccctgaacaacgggagtcaggcagtaggacgctcttcattttactgcctggagtactttccttctcagatgctgcgtaccggaaacaactttaccttcagctacacttttgaggacgttcctttccacagcagctacgctcacagccagagtctggaccgtctcatgaatcctctcatcgaccagtacctgtattacttgagcagaacaaacactccaagtggaaccaccacgcagtcaaggcttcagttttctcaggccggagcgagtgacattcgggaccagtctaggaactggcttcctggaccctgttaccgccagcagcgagtatcaaagacatctgcggataacaacaacagtgaatactcgtggactggagctaccaagtaccacctcaatggcagagactctctggtgaatccgggcccggccatggcaagccacaaggacgatgaagaaaagttttttcctcagagcggggttctcatctttgggaagcaaggctcagagaaaacaaatgtggacattgaaaaggtcatgattacagacgaagaggaaatcaggacaaccaatcccgtggctacggagcagtatggttctgtatctaccaacctccagagaggcaacagacaagcagctaccgcagatgtcaacacacaaggcgttcttccaggcatggtctggcaggacagagatgtgtaccttcaggggcccatctgggcaaagattccacacacggacggacattttcacccctctcccctcatgggtggattcggacttaaacaccctcctccacagattctcatcaagaacaccccggtacctgcgaatccttcgaccaccttcagtgcggcaaagtttgcttccttcatcacacagtactccacgggacaggtcagcgtggagatcgagtgggagctgcagaaggaaaacagcaaacgctggaatcccgaaattcagtacacttccaactacaacaagtctgttaatgtggactttactgtggacactaatggcgtgtattcagagcctcgccccattggcaccagatacctgactcgtaatctgtaa

SEQ ID NO: 4334 - DNA, 2208 bp, synthetic construct
  misc_feature 1..2208: note = source = /note="Description of Artificial Sequence: Synthetic polynucleotide"
  source 1..2208: mol_type = other DNA
atggctgccgatggttatcttccagattggctcgaggacactctctctgaaggaataagacagtggtggaagctcaaacctggcccaccaccaccaaagcccgcagagcggcataaggacgacagcaggggtcttgtgcttcctgggtacaagtacctcggacccttcaacggactcgacaagggagagccggtcaacgaggcaggcgccgcggccctcaagcacgacaaagcctacgaccggcagctcgacagcggagacaacccgtacctcaagtacaaccacgccgacgcggagtttcaggagcgccttaaagaagatacgtcttttgggggcaacctcggacgagcagtcttccaggcgaaaaagagggttcttgaacctctgggcctggttgaggaacctgttaagacggctccgggaaaaaagaggccggtagagcactctcctgtggagccagactcctcctcgggaaccggaaaggcgggccagcagcctgcaagaaaaagattgaattttggtcagactggagacgcagactcagtacctgacccccagcctctcggacagccaccagcagccccctctggtctgggaactaatacgatggctacaggcagtggcgcaccaatggcagacaataacgagggcgccgacggagtgggtaattcctcgggaaattggcattgcgattccacatggatgggcgacagagtcatcaccaccagcacccgaacctgggccctgcccacctacaacaaccacctctacaaacaaatttccagccaatcaggagcctcgaacgacaatcactactttggctacagcaccccttgggggtattttgacttcaacagattccactgccacttttcaccacgtgactggcaaagactcatcaacaacaactggggattccgacccaagagactcaacttcaagctctttaacattcaagtcaaagaggtcacgcagaatgacggtacgacgacgattgccaataaccttaccagcacggttcaggtgtttactgactcggagtaccagctcccgtacgtcctcggctcggcgcatcaaggatgcctcccgccgttcccagcagacgtcttcatggtgccacagtatggatacctcaccctgaacaacgggagtcaggcagtaggacgctcttcattttactgcctggagtactttccttctcagatgctgcgtaccggaaacaactttaccttcagctacacttttgaggacgttcctttccacagcagctacgctcacagccagagtctggaccgtctcatgaatcctctcatcgaccagtacctgtattacttgagcagaacaaacactccaagtggaaccaccacgcagtcaaggcttcagttttctcaggccggagcgagtgacattcgggaccagtctaggaactggcttcctggaccctgttaccgccagcagcgagtatcaaagacatctgcggataacaacaacagtgaatactcgtggactggagctaccaagtaccacctcaatggcagagactctctggtgaatccgggcccggccatggcaagccacaaggacgatgaagaaaagttttttcctcagagcggggttctcatctttgggaagcaaggctcagagaaaacaaatgtggacattgaaaaggtcatgattacagacgaagaggaaatcaggacaaccaatcccgtggctacggagcagtatggttctgtatctaccaacctccagagaggcaacagacaagcagctaccgcagatgtcaacacacaaggcgttcttccaggcatggtctggcaggacagagatgtgtaccttcaggggcccatctgggcaaagattccacacacggacggacattttcacccctctcccctcatgggtggattcggacttaaacaccctcctccacagattctcatcaagaacaccccggtacctgcgaatccttcgaccaccttcagtgcggcaaagtttgcttccttcatcacacagtactccacgggacaggtcagcgtggagatcgagtgggagctgcagaaggaaaacagcaaacgctggaatcccgaaattcagtacacttccaactacaacaagtctgttaatgtggactttactgtggacactaatggcgtgtattcagagcctcgccccattggcaccagatacctgactcgtaatctgtaa

SEQ ID NO: 4335 - DNA, 2208 bp, synthetic construct
  misc_feature 1..2208: note = source = /note="Description of Artificial Sequence: Synthetic polynucleotide"
  source 1..2208: mol_type = other DNA
atggctgccgatggttatcttccagattggctcgaggacactctctctgaaggaataagacagtggtggaagctcaaacctggcccaccaccaccaaagcccgcagagcggcataaggacgacagcaggggtcttgtgcttcctgggtacaagtacctcggacccttcaacggactcgacaagggagagccggtcaacgaggcagacgccgcggccctcgagcacgacaaagcctacgaccggcagctcgacagcggagacaacccgtacctcaagtacaaccacgccgacgcggagtttcaggagcgccttaaagaagatacgtcttttgggggcaacctcggacgagcagtcttccaggcgaaaaagagggttcttgaacctctgggcctggttgaggaacctgttaagacggctccgggaaaaaagaggccggtagagcactctcctgtggagccagactcctcctcgggaaccggaaaggcgggccagcagcctgcaagaaaaagattgaattttggtcagactggagacgcagactcagtacctgacccccagcctctcggacagccaccagcagccccctctggtctgggaactaatacgatggctacaggcagtggcgcaccaatggcagacaataacgagggcgccgacggagtgggtaattcctcgggaaattggcattgcgattccacatggatgggcgacagagtcatcaccaccagcacccgaacctgggccctgcccacctacaacaaccacctctacaaacaaatttccagccaatcaggagcctcgaacgacaatcactactttggctacagcaccccttgggggtattttgacttcaacagattccactgccacttttcaccacgtgactggcaaagactcatcaacaacaactggggattccgacccaagagactcaacttcaagctctttaacattcaagtcaaagaggtcacgcagaatgacggtacgacgacgattgccaataaccttaccagcacggttcaggtgtttactgactcggagtaccagctcccgtacgtcctcggctcggcgcatcaaggatgcctcccgccgttcccagcagacgtcttcatggtgccacagtatggatacctcaccctgaacaacgggagtcaggcagtaggacgctcttcattttactgcctggagtactttccttctcagatgctgcgtaccggaaacaactttaccttcagctacacttttgaggacgttcctttccacagcagctacgctcacagccagagtctggaccgtctcatgaatcctctcatcgaccagtacctgtattacttgagcagaacaaacactccaagtggaaccaccacgcagtcaaggcttcagttttctcaggccggagcgagtggcattcgggaccagtctaggaactggcttcctggaccctgttaccgccagcagcgagtatcaaagacatctgcggataacaacaacagtgaatactcgtggactggagctaccaagtaccacctcaatggcagagactctctggtgaatccgggcccggccatggcaagccacaaggacgatgaagaaaagttttttcctcagagcggggttctcatctttgggaagcaaggctcagagaaaacaaatgtggacattgaaaaggtcatgattacagacgaagaggaaatcaggacaaccaatcccgtggctacggagcagtatggttctgtatctaccaacctccagagaggcaacagacaagcagctaccgcagatgtcaacacacaaggcgttcttccaggcatggtctggcaggacagagatgtgtaccttcaggggcccatctgggcaaagattccacacacggacggacattttcacccctctcccctcatgggtggattcggacttaaacaccctcctccacagattctcatcaagaacaccccggtacctgcgaatccttcgaccaccttcagtgcggcaaagtttgcttccttcatcacacagtactccacgggacaggtcagcgtggagatcgagtgggagctgcagaaggaaaacagcaaacgctggaatcccgaaattcagtacacttccaactacaacaagtctgttaatgtggactttactgtggacactaatggcgtgtattcagagcctcgccccattggcaccagatacctgactcgtaatctgtaa

SEQ ID NO: 4336 - DNA, 2208 bp, synthetic construct
  misc_feature 1..2208: note = source = /note="Description of Artificial Sequence: Synthetic polynucleotide"
  source 1..2208: mol_type = other DNA
atggctgccgatggttatcttccagattggctcgaggacactctctctgaaggaataagacagtggtggaagctcaaacctggcccaccaccaccaaagcccgcagagcggcataaggacgacagcaggggtcttgtgcttcctgggtacaagtacctcggacccttcaacggactcgacaagggagagccggtcaacgaggcagacgccgcggccctcgagcacgacaaagcctacgaccggcagctcgacagcggagacaacccgtacctcaagtacaaccacgccgacgcggagtttcaggagcgccttaaagaagatacgtcttttgggggcaacctcggacgagcagtcttccaggcgaaaaagagggttcttgaacctctgggcctggttgaggaacctgttaagacggctccgggaaaaaagaggccggtagagcactctcctgtggagccagactcctcctcgggaaccggaaaggcgggccagcagcctgcaagaaaaagattgaattttggtcagactggagacgcagactcagtacctgacccccagcctctcggacagccaccagcagccccctctggtctgggaactaatacgatggctacaggcagtggcgcaccaatggcagacaataacgagggcgccgacggagtgggtaattcctcgggaaattggcattgcgattccacatggatgggcgacagagtcatcaccaccagcacccgaacctgggccctgcccacctacaacaaccacctctacaaacaaatttccagccaatcaggagcctcgaacgacaatcactactttggctacagcaccccttgggggtattttgacttcaacagattccactgccacttttcaccacgtgactggcaaagactcatcaacaacaactggggattccgacccaagagactcaacttcaagctctttaacattcaagtcaaagaggtcacgcagaatgacggtacgacgacgattgccaataaccttaccagcacggttcaggtgtttactgactcggagtaccagctcccgtacgtcctcggctcggcgcatcaaggatgcctcccgccgttcccagcagacgtcttcatggtgccacagtatggatacctcaccctgaacaacgggagtcaggcagtaggacgctcttcattttactgcctggagtactttccttctcagatgctgcgtaccggaaacaactttaccttcagctacacttttgaggacgttcctttccacagcagctacgctcacagccagagtctggaccgtctcatgaatcctctcatcgaccagtacctgtattacttgagcagagcaaacactccaagtggaaccaccacgcagtcaaggcttcagttttctcaggccggagcgagtgacattcgggaccagtctaggaactggcttcctggaccctgttaccgccagcagcgagtatcaaagacatctgcggataacaacaacagtgaatactcgtggactggagctaccaagtaccacctcaatggcagagactctctggtgaatccgggcccggccatggcaagccacaaggacgatgaagaaaagttttttcctcagagcggggttctcatctttgggaagcaaggctcagagaaaacaaatgtggacattgaaaaggtcatgattacagacgaagaggaaatcaggacaaccaatcccgtggctacggagcagtatggttctgtatctaccaacctccagagaggcaacagacaagcagctaccgcagatgtcaacacacaaggcgttcttccaggcatggtctggcaggacagagatgtgtaccttcaggggcccatctgggcaaagattccacacacggacggacattttcacccctctcccctcatgggtggattcggacttaaacaccctcctccacagattctcatcaagaacaccccggtacctgcgaatccttcgaccaccttcagtgcggcaaagtttgcttccttcatcacacagtactccacgggacaggtcagcgtggagatcgagtgggagctgcagaaggaaaacagcaaacgctggaatcccgaaattcagtacacttccaactacaacaagtctgttaatgtggactttactgtggacactaatggcgtgtattcagagcctcgccccattggcaccagatacctgactcgtaatctgtaa

SEQ ID NO: 4337 - DNA, 2208 bp, synthetic construct
  misc_feature 1..2208: note = source = /note="Description of Artificial Sequence: Synthetic polynucleotide"
  source 1..2208: mol_type = other DNA
atggctgccgatggttatcttccagattggctcgaggacactctctctgaaggaataagacagtggtggaagctcaaacctggcccaccaccaccaaagcccgcagagcggcataaggacgacagcaggggtcttgtgcttcctgggtacaagtacctcggacccttcaacggactcgacaagggagagccggtcaacgaggcagacgccgcggccctcgagcacgacaaagcctacgaccggcagctcgacagcggagacaacccgtacctcaagtacaaccacgccgacgcggagtttcaggagcgccttaaagaagatacgtcttttgggggcaacctcggacgagcagtcttccaggcgaaaaagagggttcttgaacctctgggcctggttgaggaacctgttaagacggctccgggaaaaaagaggccggtagagcactctcctgtggagccagactcctcctcgggaaccggaaaggcgggccagcagcctgcaagaaaaagattgaattttggtcagactggagacgcagactcagtacctgacccccagcctctcggacagccaccagcagccccctctggtctgggaactaatacgatggctacaggcagtggcgcaccaatggcagacaataacgagggcgccgacggagtgggtaattcctcgggaaattggcattgcgattccacatggatgggcgacagagtcatcaccaccagcacccgaacccgggccctgcccacctacaacaaccacctctacaaacaaatttccagccaatcaggagcctcgaacgacaatcactactttggctacagcaccccttgggggtattttgacttcaacagattccactgccacttttcaccacgtgactggcaaagactcatcaacaacaactggggattccgacccaagagactcaacttcaagctctttaacattcaagtcaaagaggtcacgcagaatgacggtacgacgacgattgccaataaccttaccagcacggttcaggtgtttactgactcggagtaccagctcccgtacgtcctcggctcggcgcatcaaggatgcctcccgccgttcccagcagacgtcttcatggtgccacagtatggatacctcaccctgaacaacgggagtcaggcagtaggacgctcttcattttactgcctggagtactttccttctcagatgctgcgtaccggaaacaactttaccttcagctacacttttgaggacgttcctttccacagcagctacgctcacagccagagtctggaccgtctcatgaatcctctcatcgaccagtacctgtattacttgagcagaacaaacactccaagtggaaccaccacgcagtcaaggcttcagttttctcaggccggagcgagtgacattcgggaccagtctaggaactggcttcctggaccctgttaccgccagcagcgagtatcaaagacatctgcggataacaacaacagtgaatactcgtggactggagctaccaagtaccacctcaatggcagagactctctggtgaatccgggcccggccatggcaagccacaaggacgatgaagaaaagttttttcctcagagcggggttctcatctttgggaagcaaggctcagagaaaacaaatgtggacattgaaaaggtcatgattacagacgaagaggaaatcaggacaaccaatcccgtggctacggagcagtatggttctgtatctaccaacctccagagaggcaacagacaagcagctaccgcagatgtcaacacacaaggcgttcttccaggcatggtctggcaggacagagatgtgtaccttcaggggcccatctgggcaaagattccacacacggacggacattttcacccctctcccctcatgggtggattcggacttaaacaccctcctccacagattctcatcaagaacaccccggtacctgcgaatccttcgaccaccttcagtgcggcaaagtttgcttccttcatcacacagtactccacgggacaggtcagcgtggagatcgagtgggagctgcagaaggaaaacagcaaacgctggaatcccgaaattcagtacacttccaactacaacaagtctgttaatgtggactttactgtggacactaatggcgtgtattcagagcctcgccccattggcaccagatacctgactcgtaatctgtaa

SEQ ID NO: 4338 - DNA, 2208 bp, synthetic construct
  misc_feature 1..2208: note = source = /note="Description of Artificial Sequence: Synthetic polynucleotide"
  source 1..2208: mol_type = other DNA
atggctgccgatggttatcttccagattggctcgaggacactctctctgaaggaataagacagtggtggaagctcaaacctggcccaccaccaccaaagcccgcagagcggcataaggacgacagcaggggtcttgtgcttcctgggtacaagtacctcggacccttcaacggactcgacaagggagagccggtcaacgaggcagacgccgcggccctcgagcacgacaaagcctacgaccggcagctcgacagcggagacaacccgtacctcaagtacaaccacgccgacgcggagtttcaggagcgccttaaagaagatacgtcttttgggggcaacctcggacgagcagtcttccaggcgaaaaagagggttcttgaacctctgggcctggttgaggaacctgttaagacggctccgggaaaaaagaggccggtagagcactctcctgtggagccagactcctcctcgggaaccggaaaggcgggccagcagcctgcaagaaaaagattgaattttggtcagactggagacgcagactcagtacctgacccccagcctctcggacagccaccagcagccccctctggtctgggaactaatacgatggctacaggcagtggcgcaccaatggcagacaataacgagggcgccgacggagtgggtaattcctcgggaaattggcattgcgattccacatggatgggcgacagagtcatcaccaccagcacccgaacctgggccctgcccacctacaacagccacctctacaaacaaatttccagccaatcaggagcctcgaacgacaatcactactttggctacagcaccccttgggggtattttgacttcaacagattccactgccacttttcaccacgtgactggcaaagactcatcaacaacaactggggattccgacccaagagactcaacttcaagctctttaacattcaagtcaaagaggtcacgcagaatgacggtacgacgacgattgccaataaccttaccagcacggttcaggtgtttactgactcggagtaccagctcccgtacgtcctcggctcggcgcatcaaggatgcctcccgccgttcccagcagacgtcttcatggtgccacagtatggatacctcaccctgaacaacgggagtcaggcagtaggacgctcttcattttactgcctggagtactttccttctcagatgctgcgtaccggaaacaactttaccttcagctacacttttgaggacgttcctttccacagcagctacgctcacagccagagtctggaccgtctcatgaatcctctcatcgaccagtacctgtattacttgagcagaacaaacactccaagtggaaccaccacgcagtcaaggcttcagttttctcaggccggagcgagtgacattcgggaccagtctaggaactggcttcctggaccctgttaccgccagcagcgagtatcaaagacatctgcggataacaacaacagtgaatactcgtggactggagctaccaagtaccacctcaatggcagagactctctggtgaatccgggcccggccatggcaagccacaaggacgatgaagaaaagttttttcctcagagcggggttctcatctttgggaagcaaggctcagagaaaacaaatgtggacattgaaaaggtcatgattacagacgaagaggaaatcaggacaaccaatcccgtggctacggagcagtatggttctgtatctaccaacctccagagaggcaacagacaagcagctaccgcagatgtcaacacacaaggcgttcttccaggcatggtctggcaggacagagatgtgtaccttcaggggcccatctgggcaaagattccacacacggacggacattttcacccctctcccctcatgggtggattcggacttaaacaccctcctccacagattctcatcaagaacaccccggtacctgcgaatccttcgaccaccttcagtgcggcaaagtttgcttccttcatcacacagtactccacgggacaggtcagcgtggagatcgagtgggagctgcagaaggaaaacagcaaacgctggaatcccgaaattcagtacacttccaactacaacaagtctgttaatgtggactttactgtggacactaatggcgtgtattcagagcctcgccccattggcaccagatacctgactcgtaatctgtaa

SEQ ID NO: 4339 - DNA, 2208 bp, synthetic construct
  misc_feature 1..2208: note = source = /note="Description of Artificial Sequence: Synthetic polynucleotide"
  source 1..2208: mol_type = other DNA
atggctgccgatggttatcttccagattggctcgaggacactctctctgaaggaataagacagtggtggaagctcaaacctggcccaccaccaccaaagcccgcagagcggcataaggacgacagcaggggtcttgtgcttcctgggtacaagtacctcggacccttcaacggactcgacaagggagagccggtcaacgaggcagacgccgcggccctcgagcacgacaaagcctacgaccggcagctcgacagcggagacaacccgtacctcaagtacaaccacgccgacgcggagtttcaggagcgccttaaagaagatacgtcttttgggggcaacctcggacgagcagtcttccaggcgaaaaagagggttcttgaacctctgggcctggttgaggaacctgttaagacggctccgggaaaaaagaggccggtagagcactctcctgtggagccagactcctcctcgggaaccggaaaggcgggccagcagcctgcaagaaaaagattgaattttggtcagactggagacgcagactcagtacctgacccccagcctctcggacagccaccagcagccccctctggtctgggaactaatacgatggctacaggcagtggcgcaccaatggcagacaataacgagggcgccgacggagtgggtaattcctcgggaaattggcattgcgattccacatggatgggcgacagagtcatcaccaccagcacccgaacctgggccctgcccacctacaacaaccacctctacaaacaaatttccagccaatcaggagcctcgaacgacaatcactactttggctacagcaccccttgggggtattttgacttcaacagattccactgccacttttcaccacgtgactggcaaagactcatcaacaacaactggggattccgacccaagagactcaacttcaagctctttaacattcaagtcaaagaggtcacgcagaatgacggtacgacgacgattgccaataaccttaccagcacggttcaggtgtttactgactcggagtaccagctcccgtacgtcctcggctcggcgcatcaaggatgcctcccgccgttcccagcagacgtcttcatggtgccacagtatggatacctcaccctgaacaacgggagtcaggcagtaggacgctcttcattttactgcctggagtactttccttctcagatgctgcgtaccggaaacaactttaccttcagctacacttttgaggacgttcctttccacagcagctacgctcacagccagagtctggaccgtctcatgaatcctctcatcgaccagtacctgtattacttgagcagaacaaacactccaagtggaaccaccacgcagtcaaggcttcagttttctcaggccggagcgagtgacattcgggaccagtctaggaactggcttcctggaccctgttaccgccagcagcgagtatcaaagacatctgcggataacaacaacagtgaatactcgtggactggagctaccaagtaccacctcaatggcagagactctctggtgaatccgggcccggccatggcaagccacaaggacgatgaagaaaagttttttcctcagagcggggttctcatctttgggaagcaaggctcagagaaaacaaatgtggacattgaaaaggtcatgattacagacgaagaggaaatcaggacaaccaatcccgtggctacggagcagtatggttctgtatctaccaacctccagagaggcaacagacaagcagctaccgcagatgtcaacacacaaggcgttcttccaggcatggtctggcaggacagagatgtgtaccttcaggggcccatctgggcaaagattccacacacggacggacattttcacccctctcccctcatgggtggattcggacttaaacgccctcctccacagattctcatcaagaacaccccggtacctgcgaatccttcgaccaccttcagtgcggcaaagtttgcttccttcatcacacagtactccacgggacaggtcagcgtggagatcgagtgggagctgcagaaggaaaacagcaaacgctggaatcccgaaattcagtacacttccaactacaacaagtctgttaatgtggactttactgtggacactaatggcgtgtattcagagcctcgccccattggcaccagatacctgactcgtaatctgtaa

SEQ ID NO: 4340 - DNA, 2208 bp, synthetic construct
  misc_feature 1..2208: note = source = /note="Description of Artificial Sequence: Synthetic polynucleotide"
  source 1..2208: mol_type = other DNA
atggctgccgatggttatcttccagattggctcgaggacactctctctgaaggaataagacagtggtggaagctcaaacctggcccaccaccaccaaagcccgcagagcggcataaggacgacagcaggggtcttgtgcttcctgggtacaagtacctcggacccttcaacggactcgacaagggagagccggtcaacgaggcagacgccgcggccctcgagcacgacaaagcctacgaccggcagctcgacagcggagacaacccgtacctcaagtacaaccacgccgacgcggagtttcaggagcgccttaaagaagatacgtcttttgggggcaacctcggacgagcagtcttccaggcgaaaaagagggttcttgaacctctgggcctggttgaggaacctgttaagacggctccgggaaaaaagaggccggtagagcactctcctgtggagccagactcctcctcgggaaccggaaaggcgggccagcagcctgcaagaaaaagattgaattttggtcagactggagacgcagactcagtacctgacccccagcctctcggacagccaccagcagccccctctggtctgggaactaatacgatggctacaggcagtggcgcaccaatggcagacaataacgagggcgccgacggagtgggtaattcctcgggaaattggcattgcgattccacatggatgggcgacagagtcatcaccaccagcacccgaacctgggccctgcccacctacaacaaccacctctacaaacaaatttccagccaatcaggagcctcgaacgacaatcactactttggctacagcaccccttgggggtattttgacttcaacagattccactgccacttttcaccacgtgactggcaaagactcatcaacaacaactggggattccgacccaagagactcaacttcaagctctttaacattcaagtcaaagaggtcacgcagaatgacggtacgacgacgattgccaataaccttaccagcacggttcaggtgtttactgactcggagtaccggctcccgtacgtcctcggctcggcgcatcaaggatgcctcccgccgttcccagcagacgtcttcatggtgccacagtatggatacctcaccctgaacaacgggagtcaggcagtaggacgctcttcattttactgcctggagtactttccttctcagatgctgcgtaccggaaacaactttaccttcagctacacttttgaggacgttcctttccacagcagctacgctcacagccagagtctggaccgtctcatgaatcctctcatcgaccagtacctgtattacttgagcagaacaaacactccaagtggaaccaccacgcagtcaaggcttcagttttctcaggccggagcgagtgacattcgggaccagtctaggaactggcttcctggaccctgttaccgccagcagcgagtatcaaagacatctgcggataacaacaacagtgaatactcgtggactggagctaccaagtaccacctcaatggcagagactctctggtgaatccgggcccggccatggcaagccacaaggacgatgaagaaaagttttttcctcagagcggggttctcatctttgggaagcaaggctcagagaaaacaaatgtggacattgaaaaggtcatgattacagacgaagaggaaatcaggacaaccaatcccgtggctacggagcagtatggttctgtatctaccaacctccagagaggcaacagacaagcagctaccgcagatgtcaacacacaaggcgttcttccaggcatggtctggcaggacagagatgtgtaccttcaggggcccatctgggcaaagattccacacacggacggacattttcacccctctcccctcatgggtggattcggacttaaacaccctcctccacagattctcatcaagaacaccccggtacctgcgaatccttcgaccaccttcagtgcggcaaagtttgcttccttcatcacacagtactccacgggacaggtcagcgtggagatcgagtgggagctgcagaaggaaaacagcaaacgctggaatcccgaaattcagtacacttccaactacaacaagtctgttaatgtggactttactgtggacactaatggcgtgtattcagagcctcgccccattggcaccagatacctgactcgtaatctgtaa

SEQ ID NO: 4341 - DNA, 2208 bp, synthetic construct
  misc_feature 1..2208: note = source = /note="Description of Artificial Sequence: Synthetic polynucleotide"
  source 1..2208: mol_type = other DNA
atggctgccgatggttatcttccagattggctcgaggacactctctctgaaggaataagacagtggtggaagctcaaacctggcccaccaccaccaaagcccgcagagcggcataaggacgacagcaggggtcttgtgcttcctgggtacaagtacctcggacccttcaacggactcgacaagggagagccggtcaacgaggcagacgccgcggccctcgagcacgacaaagcctacgaccggcagctcgacagcggagacaacccgtacctcaagtacaaccacgccgacgcggagtttcaggagcgccttaaagaagatacgtcttttgggggcaacctcggacgagcagtcttccaggcgaaaaagagggttcttgaacctctgggcctggttgaggaacctgttaagacggctccgggaaaaaagaggccggtagagcactctcctgtggagccagactcctcctcgggaaccggaaaggcgggccagcagcctgcaagaaaaagattgaattttggtcagactggagacgcagactcagtacctgacccccagcctctcggacagccaccagcagccccctctggtctgggaactaatacgatggctacaggcagtggcgcaccaatggcagacaataacgagggcgccgacggagtgggtaattcctcgggaaattggcattgcgattccacatggatgggcgacagagtcatcaccaccagcacccgaacctgggccctgcccacctacaacaaccacctctacaaacaaatttccagccaatcaggagcctcgaacgacaatcactactttggctacagcaccccttgggggtattttgacttcaacagattccactgccacttttcaccacgtgactggcaaagactcatcaacaacaactggggattccgacccaagagactcaacttcaagctctttaacattcaagtcaaagaggtcacgcagaatgacggtacgacgacgattgccaataaccttaccagcacggttcgggtgtttactgactcggagtaccagctcccgtacgtcctcggctcggcgcatcaaggatgcctcccgccgttcccagcagacgtcttcatggtgccacagtatggatacctcaccctgaacaacgggagtcaggcagtaggacgctcttcattttactgcctggagtactttccttctcagatgctgcgtaccggaaacaactttaccttcagctacacttttgaggacgttcctttccacagcagctacgctcacagccagagtctggaccgtctcatgaatcctctcatcgaccagtacctgtattacttgagcagaacaaacactccaagtggaaccaccacgcagtcaaggcttcagttttctcaggccggagcgagtgacattcgggaccagtctaggaactggcttcctggaccctgttaccgccagcagcgagtatcaaagacatctgcggataacaacaacagtgaatactcgtggactggagctaccaagtaccacctcaatggcagagactctctggtgaatccgggcccggccatggcaagccacaaggacgatgaagaaaagttttttcctcagagcggggttctcatctttgggaagcaaggctcagagaaaacaaatgtggacattgaaaaggtcatgattacagacgaagaggaaatcaggacaaccaatcccgtggctacggagcagtatggttctgtatctaccaacctccagagaggcaacagacaagcagctaccgcagatgtcaacacacaaggcgttcttccaggcatggtctggcaggacagagatgtgtaccttcaggggcccatctgggcaaagattccacacacggacggacattttcacccctctcccctcatgggtggattcggacttaaacaccctcctccacagattctcatcaagaacaccccggtacctgcgaatccttcgaccaccttcagtgcggcaaagtttgcttccttcatcacacagtactccacgggacaggtcagcgtggagatcgagtgggagctgcagaaggaaaacagcaaacgctggaatcccgaaattcagtacacttccaactacaacaagtctgttaatgtggactttactgtggacactaatggcgtgtattcagagcctcgccccattggcaccagatacctgactcgtaatctgtaa

SEQ ID NO: 4342 - DNA, 2208 bp, synthetic construct
  misc_feature 1..2208: note = source = /note="Description of Artificial Sequence: Synthetic polynucleotide"
  source 1..2208: mol_type = other DNA
atggctgccgatggttatcttccagattggctcgaggacactctctctgaaggaataagacagtggtggaagctcaaacctggcccaccaccaccaaagcccgcagagcggcatagggacgacagcaggggtcttgtgcttcctgggtacaagtacctcggacccttcaacggactcgacaagggagagccggtcaacgaggcagacgccgcggccctcgagcacgacaaagcctacgaccggcagctcgacagcggagacaacccgtacctcaagtacaaccacgccgacgcggagtttcaggagcgccttaaagaagatacgtcttttgggggcaacctcggacgagcagtcttccaggcgaaaaagagggttcttgaacctctgggcctggttgaggaacctgttaagacggctccgggaaaaaagaggccggtagagcactctcctgtggagccagactcctcctcgggaaccggaaaggcgggccagcagcctgcaagaaaaagattgaattttggtcagactggagacgcagactcagtacctgacccccagcctctcggacagccaccagcagccctctctggtctgggaactaatacgatggctacaggcagtggcgcaccaatggcagacaataacgagggcgccgacggagtgggtaattcctcgggaaattggcattgcgattccacatggatgggcgacagagtcatcaccaccagcacccgaacctgggccctgcccacctacaacaaccacctctacaaacaaatttccagccaatcaggagcctcgaacggcaatcactactttggctacagcaccccttgggggtattttgacttcaacagattccactgccacttttcaccacgtgactggcaaagactcatcaacaacaactggggattccgacccaagagactcaacttcaagctctttaacattcaagtcaaagaggtcacgcagaatgacggtacgacgacgattgccaataaccttaccagcacggttcaggtgtttactgactcggagtaccagctcccgtacgtcctcggctcggcgcatcaaggatgcctcccgccgttcccagcagacgtcttcatggtgccacagtatggatacctcaccctgaacaacgggagtcaggcagtaggacgctcttcattttactgcctggagtactttccttctcagatgctgcgtaccggaaacaactttaccttcagctacacttttgaggacgttcctttccacagcagctacgctcacagccagagtctggaccgtctcatgaatcctctcatcgaccagtacctgtattacttgagcagaacaaacactccaagtggaaccaccacgcagtcaaggcttcagttttctcaggccggagcgagtgacattcgggaccagtctaggaactggcttcctggaccctgttaccgccagcagcgagtatcaaagacatctgcggataacaacaacagtgaatactcgtggactggagctaccaagtaccacctcaatggcagagactctctggtgaatccgggcccggccatggcaagccacaaggacgatgaagaaaagttttttcctcagagcggggttctcatctttgggaagcaaggctcagagaaaacaaatgtggacattgaaaaggtcatgattacagacgaagaggaaatcaggacaaccaatcccgtggctacggagcagtatggttctgtatctaccaacctccagaggggcaacagacaagcagctaccgcagatgtcaacacacaaggcgttcttccaggcatggtctggcaggacagagatgtgtaccttcaggggcccatctgggcaaagattccacacacggacggacattttcacccctctcccctcatgggtggattcggacttaaacaccctcctccacagattctcatcaagaacaccccggtacctgcgaatccttcgaccaccttcagtgcggcaaagtttgcttccttcatcacacagtactccacgggacaggtcagcgtggagatcgagtgggagctgcagaaggaaaacagcaaacgctggaatcccgaaattcagtacacttccaactacaacaagtctgttaatgtggactttactgtggacactaatggcgtgtattcagagcctcgccccattggcaccagatacctgactcgtaatctgtaa

SEQ ID NO: 4343 - DNA, 2208 bp, synthetic construct
  misc_feature 1..2208: note = source = /note="Description of Artificial Sequence: Synthetic polynucleotide"
  source 1..2208: mol_type = other DNA
atggctgccgatggttatcttccagattggctcgaggacactctctctgaaggaataagacagtggtggaagctcaaacctggcccaccaccaccaaagcccgcagagcggcatagggacgacagcaggggtcttgtgcttcctgggtacaagtacctcggacccttcaacggactcgacaagggagagccggtcaacgaggcagacgccgcggccctcgagcacgacaaagcctacgaccggcagctcgacagcggagacaacccgtacctcaagtacaaccacgccgacgcggagtttcaggagcgccttaaagaagatacgtcttttgggggcaacctcggacgagcagtcttccaggcgaaaaagagggttcttgaacctctgggcctggttggggaacctgttaagacggctccgggaaaaaagaggccggtagagcactctcctgtggagccagactcctcctcgggaaccggaaaggcgggccagcagcctgcaagaaaaagattgaattttggtcagactggagacgcagactcagtacctgacccccagcctctcggacagccaccagcagccccctctggtctgggaactaatacgatggctacaggcagtggcgcaccaatggcagacaataacgagggcgccgacggagtgggtaattcctcgggaaattggcattgcgattccacatggatgggcgacagagtcatcaccaccagcacccgaacctgggccctgcccacctacaacaaccacctctacaaacaaatttccagccaatcaggagcctcgaacggcaatcactactttggctacagcaccccttgggggtattttgacttcaacagattccactgccacttttcaccacgtgactggcaaagactcatcaacaacaactggggattccgacccaagagactcaacttcaagctctttaacattcaagtcaaagaggtcacgcagaatgacggtacgacgacgattgccaataaccttaccagcacggttcaggtgtttactgactcggagtaccagctcccgtacgtcctcggctcggcgcatcaaggatgcctcccgccgttcccagcagacgtcttcatggtgccacagtatggatacctcaccctgaacaacgggagtcaggcagtaggacgctcttcattttactgcctggagtactttccttctcagatgctgcgtaccggaaacaactttaccttcagctacacttttgaggacgttcctttccacagcagctacgctcacagccagagtctggaccgtctcatgaatcctctcatcgaccagtacctgtattacttgagcagaacaaacactccaagtggaaccaccacgcagtcaaggcttcagttttctcaggccggagcgagtgacattcgggaccagtctaggaactggcttcctggaccctgttaccgccagcagcgagtatcaaagacatctgcggataacaacaacagtgaatactcgtggactggagctaccaagtaccacctcaatggcagagactctctggtgaatccgggcccggccatggcaagccacaaggacgatgaagaaaagttttttcctcagagcggggttctcatctttgggaagcaaggctcagagaaaacaaatgtggacattgaaaaggtcatgattacagacgaagaggaaatcaggacaaccaatcccgtggctacggagcagtatggttctgtatctaccaacctccagaggggcaacagacaagcagctaccgcagatgtcaacacacaaggcgttcttccaggcatggtctggcaggacagagatgtgtaccttcaggggcccatctgggcaaagattccacacacggacggacattttcacccctctcccctcatgggtggattcggacttaaacaccctcctccacagattctcatcaagaacaccccggtacctgcgaatccttcgaccaccttcagtgcggcaaagtttgcttccttcatcacacagtactccacgggacaggtcagcgtggagatcgagtgggagctgcagaaggaaaacagcaaacgctggaatcccgaaattcagtacacttccaactacaacaagtctgttaatgtggactttactgtggacactaatggcgtgtattcagagcctcgccccattggcaccagatacctgactcgtaatctgtaa

SEQ ID NO: 4344 - DNA, 2208 bp, synthetic construct
  misc_feature 1..2208: note = source = /note="Description of Artificial Sequence: Synthetic polynucleotide"
  source 1..2208: mol_type = other DNA
atggctgccgatggttatcttccagattggctcgaggacactctctctgaaggaataagacagtggtggaagctcaaacctggcccaccaccaccaaagcccgcagagcggcatagggacgacagcaggggtcttgtgcttcctgggtacaagtacctcggacccttcaacggactcgacaagggagagccggtcaacgaggcagacgccgcggccctcgagcacgacaaagcctacgaccggcagctcgacagcggagacaacccgtacctcaagtacaaccacgccgacgcggagtttcaggagcgccttaaagaagatacgtcttttgggggcaacctcggacgagcagtcttccaggcgaaaaagagggttcttgaacctctgggcctggttgaggaacctgttaagacggctccgggaaaaaagaggccggtagagcactctcctgtggagccagactcctcctcgggaaccggaaaggcgggccagcagcctgcaagaaaaagattgaattttggtcagactggagacgcagactcagtacctgacccccagcctctcggacagccaccagcagccccctctggtctgggaactaatacgatggctacaggcagtggcgcaccaatggcagacaataacgagggcgccgacggagtgggtaattcctcgggaaattggcattacgattccgcatggatgggcgacagagtcatcaccaccagcacccgaacctgggccctgcccacctacaacaaccacctctacaaacaaatttccagccaatcaggagcctcgaacggcaatcactactttggctacagcaccccttgggggtattttgacttcaacagattccactgccacttttcaccacgtgactggcaaagactcatcaacaacaactggggattccgacccaagagactcaacttcaagctctttaacattcaagtcaaagaggtcacgcagaatgacggtacgacgacgattgccaataaccttaccagcacggttcaggtgtttactgactcggagtaccagctcccgtacgtcctcggctcggcgcatcaaggatgcctcccgccgttcccagcagacgtcttcatggtgccacagtatggatacctcaccctgaacaacgggagtcaggcagtaggacgctcttcattttactgcctggagtactttccttctcagatgctgcgtaccggaaacaactttaccttcagctacacttttgaggacgttcctttccacagcagctacgctcacagccagagtctggaccgtctcatgaatcctctcatcgaccagtacctgtattacttgagcagaacaaacactccaagtggaaccaccacgcagtcaaggcttcagttttctcaggccggagcgagtgacattcgggaccagtctaggaactggcttcctggaccctgttaccgccagcagcgagtatcaaagacatctgcggataacaacaacagtgaatactcgtggactggagctaccaagtaccacctcaatggcagagactctctggtgaatccgggcccggccatggcaagccacaaggacgatgaagaaaagttttttcctcagagcggggttctcatctttgggaagcaaggctcagagaaaacaaatgtggacattgaaaaggtcatgattacagacgaagaggaaatcaggacaaccaatcccgtggctacggagcagtatggttctgtatctaccaacctccagaggggcaacagacaagcagctaccgcagatgtcaacacacaaggcgttcttccaggcatggtctggcaggacagagatgtgtaccttcaggggcccatctgggcaaagattccacacacggacggacattttcacccctctcccctcatgggtggattcggacttaaacaccctcctccacagattctcatcaagaacaccccggtacctgcgaatccttcgaccaccttcagtgcggcaaagtttgcttccttcatcacacagtactccacgggacaggtcagcgtggagatcgagtgggagctgcagaaggaaaacagcaaacgctggaatcccgaaattcagtacacttccaactacaacaagtctgttaatgtggactttactgtggacactaatggcgtgtattcagagcctcgccccattggcaccagatacctgactcgtaatctgtaa

SEQ ID NO: 4345 - DNA, 2208 bp, synthetic construct
  misc_feature 1..2208: note = source = /note="Description of Artificial Sequence: Synthetic polynucleotide"
  source 1..2208: mol_type = other DNA
atggctgccgatggttatcttccagattggctcgaggacactctctctgaaggaataagacagtggtggaagctcaaacctggcccaccaccaccaaagcccgcagagcggcatagggacgacagcaggggtcttgtgcttcctgggtacaagtacctcggacccttcaacggactcgacaagggagagccggtcaacgaggcagacgccgcggccctcgagcacgacaaagcctacgaccggcagctcgacagcggagacaacccgtacctcaagtacaaccacgccgacgcggagtttcaggagcgccttaaagaagatacgtcttttgggggcaacctcggacgagcagtcttccaggcgaaaaagagggttcttgaacctctgggcctggttgaggaacctgttaagacggctccgggaaaaaagaggccggtagagcactctcctgtggagccagactcctcctcgggaaccggaaaggcgggccagcagcctgcaagaaaaagattgaattttggtcagactggagacgcagactcagtacctgacccccagcctctcggacagccaccagcagccccctctggtctgggaactaatacgatggctacaggcagtggcgcaccaatggcagacaataacgagggcgccgacggagtgggtaattcctcgggaaattggcattgcgattccacatggatgggcgacagagtcatcaccaccagcacccgaacctgggccctgcccacctacaacaaccacctctacaaacaaatttccagccaatcaggagcctcgaacggcaatcactactttggctacagcaccccttgggggtattttgacttcaacagattccactgccacttttcaccacgtgactggcaaagactcatcaacaacaactggggattccgacccaagagactcaacttcaagctctttaacattcaagtcaaagaggtcacgcagaatgacggtacgacgacgattgccaataaccttaccagcacggttcaggtgtttactgactcggagtaccagctcccgtacgtcctcggctcggcgcatcaaggatgcctcccgccgttcccagcagacgtcttcatggtgccacagtatggatacctcaccctgaacaacgggagtcaggcagtaggacgctcttcattttactgcctggagtactttccttctcagatgctgcgtaccggaaacaactttaccttcagctacacttttgaggacgttcctttccacagcagctacgctcacagccagagtctggaccgtctcatgaatcctctcatcgaccagtacctgtattacttgagcagaacaaacactccaagtggaaccaccacgcagtcaaggcttcagttttctcaggccggagcgagtgacattcgggaccagtctaggaactggcttcctggaccctgttaccgccagcagcgagtatcaaagacatctgcggataacaacaacagtgaatactcgtggactggagctaccaagtaccacctcaatggcagagactctctggtgaatccgggcccggccatggcaagccacaaggacgatgaagaaaagttttttcctcagagcggggttctcatctttgggaagcaaggctcagagaaaacaaatgtggacattgaaaaggtcatgattacagacgaagaggaaatcaggacaaccaatcccgtggctacggagcagtatggttctgtatctaccaacctccagaggggcaacagacaagcagctaccgcagatgtcaacacacaaggcgttcttccaggcatggtctggcaggacagagatgtgtaccttcaggggcccatctgggcaaagattccacacacggacggacattttcacccctctcccctcatgggtggattcggacttaaacaccctcctccacagattctcatcaagaacaccccggtacctgcgaatccttcgaccaccttcagtgcggcaaagtttgcttccttcatcgcacagtactccacgggacaggtcagcgtggagatcgagtgggagctgcagaaggaaaacagcaaacgctggaatcccgaaattcagtacacttccaactacaacaagtctgttaatgtggactttactgtggacactaatggcgtgtattcagagcctcgccccattggcaccagatacctgactcgtaatctgtaa

SEQ ID NO: 4346 - DNA, 2208 bp, synthetic construct
  misc_feature 1..2208: note = source = /note="Description of Artificial Sequence: Synthetic polynucleotide"
  source 1..2208: mol_type = other DNA
atggctgccgatggttatcttccagattggctcgaggacactctctctgaaggaataagacagtggtggaagctcaaacctggcccaccaccaccaaagcccgcagagcggcatagggacgacagcaggggtcttgtgcttcctgggtacaagtacctcggacccttcaacggactcgacaagggagagccggtcaacgaggcagacgccgcggccctcgagcacgacaaagcctacgaccggcagctcgacagcggagacaacccgtacctcaagtacaaccacgccgacgcggagtttcaggagcgccttaaagaagatacgtcttttgggggcaacctcggacgagcagtcttccaggcgaaaaagagggttcttgaacctctgggcctggttgaggaacctgttaagacggctccgggaaaaaagaggccggtagagcactctcctgtggagccagactcctcctcgggaaccggaaaggcgggccagcagcctgcaagaaaaagattgaattttggtcagactggagacgcagactcagtacctgacccccagcctctcggacagccaccagcagccccctctggtctgggaactaatacgatggctacaggcagtggcgcaccaatggcagacaataacgagggcgccgacggagtgggtaattcctcgggaaattggcattgcgattccacatggatgggcgacagagtcatcaccaccagcacccgaacctgggccctgcccacctacaacaaccacctctacaaacaaatttccagccaatcaggagcctcgaacggcaatcactactttggctacagcaccccttgggggtattttgacttcaacagattccactgccacttttcaccacgtgactggcaaagactcatcaacaacaactggggattccgacccaagagactcaacttcaagctctttaacattcaagtcaaagaggtcacgcagaatgacggtacgacgacgattgccaataaccttaccagcacggttcaggtgtttactgactcggagtaccagctcccgtacgtcctcggctcggcgcatcaaggatgcctcccgccgttcccagcagacgtcttcatggtgccacagtatggatacctcaccctgaacaacgggagtcaggcagtaggacgctcttcattttactgcctggagtactttccttctcagatgctgcgtaccggaaacaactttaccttcagctacacttttgaggacgttcctttccacagcagctacgctcacagccagagtctggaccgtctcatgaatcctctcatcgaccagtacccgtattacttgagcagaacaaacactccaagtggaaccaccacgcagtcaaggcttcagttttctcaggccggagcgagtgacattcgggaccagtctaggaactggcttcctggaccctgttaccgccagcagcgagtatcaaagacatctgcggataacaacaacagtgaatactcgtggactggagctaccaagtaccacctcaatggcagagactctctggtgaatccgggcccggccatggcaagccacaaggacgatgaagaaaagttttttcctcagagcggggttctcatctttgggaagcaaggctcagagaaaacaaatgtggacattgaaaaggtcatgattacagacgaagaggaaatcaggacaaccaatcccgtggctacggagcagtatggttctgtatctaccaacctccagaggggcaacagacaagcagctaccgcagatgtcaacacacaaggcgttcttccaggcatggtctggcaggacagagatgtgtaccttcaggggcccatctgggcaaagattccacacacggacggacattttcacccctctcccctcatgggtggattcggacttaaacaccctcctccacagattctcatcaagaacaccccggtacctgcgaatccttcgaccaccttcagtgcggcaaagtttgcttccttcatcacacagtactccacgggacaggtcagcgtggagatcgagtgggagctgcagaaggaaaacagcaaacgctggaatcccgaaattcagtacacttccaactacaacaagtctgttaatgtggactttactgtggacactaatggcgtgtattcagagcctcgccccattggcaccagatacctgactcgtaatctgtaa

SEQ ID NO: 4347 - DNA, 2208 bp, synthetic construct
  misc_feature 1..2208: note = source = /note="Description of Artificial Sequence: Synthetic polynucleotide"
  source 1..2208: mol_type = other DNA
atggctgccgatggttatcttccagattggctcgaggacactctctctgaaggaataagacagtggtggaagctcaaacctggcccaccaccaccaaagcccgcagagcggcatagggacgacagcaggggtcttgtgcttcctgggtacaagtacctcggacccttcaacggactcgacaagggagagccggtcaacgaggcagacgccgcggccctcgagcacgacaaagcctacgaccggcagctcgacagcggagacaacccgtacctcaagtacaaccacgccgacgcggagtttcaggagcgccttaaagaagatacgtcttttgggggcaacctcggacgagcagtcttccaggcgaaaaagagggttcttgaacctctgggcctggttgaggaacctgttaagacggctccgggaaaaaagaggccggtagagcactctcctgtggagccagactcctcctcgggaaccggaaaggcgggccagcagcctgcaagaaaaagattgaattttggtcagactggagacgcagactcagtacctgacccccagcctctcggacagccaccagcagccccctctggtctgggaactaatacgatggctacaggcagtggcgcaccaatggcagacaataacgagggcgccgacggagtgggtaattcctcgggaaattggcattgcgattccacatggatgggcgacagagtcatcaccaccagcacccgaacctgggccctgcccacctacaacaaccacctctacaaacaaatttccagccaatcaggagcctcgaacggcaatcactactttggctacagcaccccttgggggtattttgacttcaacagattccactgccacttttcaccacgtgaccggcaaagactcatcaacaacaactggggattccgacccaagagactcaacttcaagctctttaacattcaagtcaaagaggtcacgcagaatgacggtacgacgacgattgccaataaccttaccagcacggttcaggtgtttactgactcggagtaccagctcccgtacgtcctcggctcggcgcatcaaggatgcctcccgccgttcccagcagacgtcttcatggtgccacagtatggatacctcaccctgaacaacgggagtcaggcagtaggacgctcttcattttactgcctggagtactttccttctcagatgctgcgtaccggaaacaactttaccttcagctacacttttgaggacgttcctttccacagcagctacgctcacagccagagtctggaccgtctcatgaatcctctcatcgaccagtacctgtattacttgagcagaacaaacactccaagtggaaccaccacgcagtcaaggcttcagttttctcaggccggagcgagtgacattcgggaccagtctaggaactggcttcctggaccctgttaccgccagcagcgagtatcaaagacatctgcggataacaacaacagtgaatactcgtggactggagctaccaagtaccacctcaatggcagagactctctggtgaatccgggcccggccatggcaagccacaaggacgatgaagaaaagttttttcctcagagcggggttctcatctttgggaagcaaggctcagagaaaacaaatgtggacattgaaaaggtcatgattacagacgaagaggaaatcaggacaaccaatcccgtggctacggagcagtatggttctgtatctaccaacctccagaggggcaacagacaagcagctaccgcagatgtcaacacacaaggcgttcttccaggcatggtctggcaggacagagatgtgtaccttcaggggcccatctgggcaaagattccacacacggacggacattttcacccctctcccctcatgggtggattcggacttaaacaccctcctccacagattctcatcaagaacaccccggtacctgcgaatccttcgaccaccttcagtgcggcaaagtttgcttccttcatcacacagtactccacgggacaggtcagcgtggagatcgagtgggagctgcagaaggaaaacagcaaacgctggaatcccgaaattcagtacacttccaactacaacaagtctgttaatgtggactttactgtggacactaatggcgtgtattcagagcctcgccccattggcaccagatacctgactcgtaatctgtaa

SEQ ID NO: 4348 - DNA, 2208 bp, synthetic construct
  misc_feature 1..2208: note = source = /note="Description of Artificial Sequence: Synthetic polynucleotide"
  source 1..2208: mol_type = other DNA
atggctgccgatggttatcttccagattggctcgaggacactctctctgaaggaataagacagtggtggaagctcaaacctggcccaccaccaccaaagcccgcagagcggcatagggacgacagcaggggtcttgtgcttcctgggtacaagtacctcggacccttcaacggactcgacaagggagagccggtcaacgaggcagacgccgcggccctcgagcacgacaaagcctacgaccggcagctcgacagcggagacaacccgtacctcaagtacaaccacgccgacgcggagtttcaggagcgccttaaagaagatacgtcttttgggggcaacctcggacgagcagtcttccaggcgaaaaagagggttcttgaacctctgggcctggttgaggaacctgttaagacggctccgggaaaaaagaggccggtagagcactctcctgtggagccagactcctcctcgggaaccggaaaggcgggccagcagcctgcaagaaaaagattgaattttggtcagactggagacgcagactcagtacctgacccccagcctctcggacagccaccagcagccccctctggtctgggaactaatacgatggctacaggcagtggcgcaccaatggcagacaataacgagggcgccgacggagtgggtaattcctcgggaaattggcattgcgattccacatggatgggcgacagagtcatcaccaccagcacccgaacctgggccctgcccacctacaacaaccacctctacaaacaaatttccagccaatcaggagcctcgaacggcaatcactactttggctacagcaccccttgggggtattttgacttcaacagattccactgccacttttcaccacgtgactggcaaagactcatcaacaacaactggggattccgacccaagagactcaacttcaagctctttaacattcaagtcaaagaggtcacgcagaatgacggtacgacgacgattgccaataaccttaccagcacggttcaggtgtttactgactcggagtaccagctcccgtacgtcctcggctcggcgcatcaaggatgcctcccgccgttcccagcagacgtcttcatggtgccacagtatggatacctcaccctgaacaacgggagtcaggcagtaggacgctcttcattttactgcctggagtactttccttctcagatgctgcgtaccggaaacaactttaccttcagctacacttttgaggacgttcctttccacagcagctacgctcacagccagagtctggaccgtctcatgaatcctctcatcgaccagtacctgtattacttgagcagaacaaacactccaagtggaaccaccacgcagtcaaggcttcagttttctcaggccggagcgagtgacattcgggaccagtctaggaactggcttcctggaccctgttaccgccagcagcgagtatcaaagacatctgcggataacaacaacagtgaatactcgtggactggagctaccaagtaccacctcaatggcagagactctctggtgaatccgggcccggccatggcaagccacaaggacgatgaagaaaagttttttcctcagagcggggttctcatctttgggaagcaaggctcagagaaaacaaatgtggacattgaaaaggtcatgattacagacgaagaggaaatcaggacaaccaatcccgtggctacggagcagtatggttctgtatctaccaacctccagaggggcaacagacaagcagctaccgcagatgtcaacacacaaggcgttcttccaggcatggtctggcaggacagagatgtgtaccttcaggggcccatctgggcaaagattccacacacggacggacattttcacccctctcccctcatgggtggattcggacttaaacaccctcctccacagattctcatcaagaacaccccggtacctgcgaatccttcgaccaccttcagtgcggcaaagtttgcttccttcatcacacagtactccacgggacaggtcagcgtggagatcgagtgggagctgcagaaggaaaacagcaaacgctggaatcccgaaattcagtacacttccaactacaacaagtctgttaatgtggaccttactgtggacactaatggcgtgtattcagagcctcgccccattggcaccagatacctgactcgtaatctgtaa

SEQ ID NO: 4349 - DNA, 2208 bp, synthetic construct
  misc_feature 1..2208: note = source = /note="Description of Artificial Sequence: Synthetic polynucleotide"
  source 1..2208: mol_type = other DNA
atggctgccgatggttatcttccagattggctcgaggacactctctctgaaggaataagacagtggtggaagctcaaacctggcccaccaccaccaaagcccgcagagcggcatagggacgacagcaggggtcttgcgcttcctgggtacaagtacctcggacccttcaacggactcgacaagggagagccggtcaacgaggcagacgccgcggccctcgagcacgacaaagcctacgaccggcagctcgacagcggagacaacccgtacctcaagtacaaccacgccgacgcggagtttcaggagcgccttaaagaagatacgtcttttgggggcaacctcggacgagcagtcttccaggcgaaaaagagggttcttgaacctctgggcctggttgaggaacctgttaagacggctccgggaaaaaagaggccggtagagcactctcctgtggagccagactcctcctcgggaaccggaaaggcgggccagcagcctgcaagaaaaagattgaattttggtcagactggagacgcagactcagtacctgacccccagcctctcggacagccaccagcagccccctctggtctgggaactaatacgatggctacaggcagtggcgcaccaatggcagacaataacgagggcgccgacggagtgggtaattcctcgggaaattggcattgcgattccacatggatgggcgacagagtcatcaccaccagcacccgaacctgggccctgcccacctacaacaaccacctctacaaacaaatttccagccaatcaggagcctcgaacggcaatcactactttggctacagcaccccttgggggtattttgacttcaacagattccactgccacttttcaccacgtgactggcaaagactcatcaacaacaactggggattccgacccaagagactcaacttcaagctctttaacattcaagtcaaagaggtcacgcagaatgacggtacgacgacgattgccaataaccttaccagcacggttcaggtgtttactgactcggagtaccagctcccgtacgtcctcggctcggcgcatcaaggatgcctcccgccgttcccagcagacgtcttcatggtgccacagtatggatacctcaccctgaacaacgggagtcaggcagtaggacgctcttcattttactgcctggagtactttccttctcagatgctgcgtaccggaaacaactttaccttcagctacacttttgaggacgttcctttccacagcagctacgctcacagccagagtctggaccgtctcatgaatcctctcatcgaccagtacctgtattacttgagcagaacaaacactccaagtggaaccaccacgcagtcaaggcttcagttttctcaggccggagcgagtgacattcgggaccagtctaggaactggcttcctggaccctgttaccgccagcagcgagtatcaaagacatctgcggataacaacaacagtgaatactcgtggactggagctaccaagtaccacctcaatggcagagactctctggtgaatccgggcccggccatggcaagccacaaggacgatgaagaaaagttttttcctcagagcggggttctcatctttgggaagcaaggctcagagaaaacaaatgtggacattgaaaaggtcatgattacagacgaagaggaaatcaggacaaccaatcccgtggctacggagcagtatggttctgtatctaccaacctccagaggggcaacagacaagcagctaccgcagatgtcaacacacaaggcgttcttccaggcatggtctggcaggacagagatgtgtaccttcaggggcccatctgggcaaagattccacacacggacggacattttcacccctctcccctcatgggtggattcggacttaaacaccctcctccacagattctcatcaagaacaccccggtacctgcgaatccttcgaccaccttcagtgcggcaaagtttgcttccttcatcacacagtactccacgggacaggtcagcgtggagatcgagtgggagctgcagaaggaaaacagcaaacgctggaatcccgaaattcagtacacttccaactacaacaagtctgttaatgtggactttactgtggacactaatggcgtgtattcagagcctcgccccattggcaccagatacctgactcgtaatctgtaa

SEQ ID NO: 4350 - DNA, 2208 bp, synthetic construct
  misc_feature 1..2208: note = source = /note="Description of Artificial Sequence: Synthetic polynucleotide"
  source 1..2208: mol_type = other DNA
atggctgccgatggttatcttccagattggctcgaggacactctctctgaaggaataagacagtggtggaagctcaaacctggcccaccaccaccaaagcccgcagagcggcatagggacgacagcaggggtcttgtgcttcctgggtacaagtacctcggacccttcaacggactcgacaagggagagccggtcaacgaggcagacgccgcggccctcgagcacgacaaagcctacgaccggcagctcgacagcggagacaacccgtacctcaagtacaaccacgccgacgcggagtttcaggagcgccttaaagaagatacgtcttttgggggcaacctcggacgagcagtcttccaggcgaaaaagagggttcttgaacctctgggcctggttgaggaacctgttaagacggctccgggaaaaaagaggccggtagagcactctcctgtggagccagactcctcctcgggaaccggaaaggcgggccagcagcctgcaagaaaaagattgaattttggtcagactggagacgcagactcagtacctgacccccagcctctcggacagccaccagcagccccctctggtctgggaactaatacgatggctacaggcagtggcgcaccaatggcagacaataacgagggcgccgacggagtgggtaattcctcgggaaattggcattgcgattccacatggatgggcgacagagtcatcaccaccagcacccgaacctgggccctgcccacctacaacaaccacctctacaaacaaatttccagccaatcaggagcctcgaacggcaatcactactttggctacagcaccccttgggggtattttgacttcaacagattccactgccacttttcaccacgtgactggcaaagactcatcaacaacaactggggattccgacccaagagactcaacttcaagctctttaacattcaagtcaaagaggtcacgcagaatgacggtacgacgacgattgccaataaccttaccagcacggttcaggtgtttactgactcggagtaccagctcccgtacgtcctcggctcggcgcatcaaggatgcctcccgccgttcccagcagacgtcttcatggtgccacagtatggatacctcaccctgaacaacgggagtcaggcagtaggacgctcttcattttactgcctggagtactttccttctcagatgctgcgtaccggaaacaactttaccttcagctacacttttgaggacgttcctttccacagcagctacgctcacagccagagtctggaccgtctcatgaatcctctcatcgaccagtacctgtattacttgagcagaacaaacactccaagtggaaccaccacgcagtcaaggcttcagttttctcaggccggagcgagtgacattcgggaccagtctaggaactggcttcctggaccctgttaccgccagcagcgagtatcaaagacatctgcggataacaacaacagtgaatactcgtggactggagctaccaagtaccacctcaatggcagagactctctggtgaatccgggcccggccatggcaagccacaaggacgatgaagaaaagttttttcctcagagcggggttctcatctttgggaagcaaggctcagagaaaacaaatgtggacattgaaaaggtcatgattacagacgaagaggaaatcaggacaaccaatcccgtggctacggagcagtatggttctgtatctaccaacctccagaggggcaacagacaagcagctaccgcagatgccaacacacaaggcgttcttccaggcatggtctggcaggacagagatgtgtaccttcaggggcccatctgggcaaagattccacacacggacggacattttcacccctctcccctcatgggtggattcggacttaaacaccctcctccacagattctcatcaagaacaccccggtacctgcgaatccttcgaccaccttcagtgcggcaaagtttgcttccttcatcacacagtactccacgggacaggtcagcgtggagatcgagtgggagctgcagaaggaaaacagcaaacgctggaatcccgaaattcagtacacttccaactacaacaagtctgttaatgtggactttactgtggacactaatggcgtgtattcagagcctcgccccattggcaccagatacctgactcgtaatctgtaa

SEQ ID NO: 4351 - DNA, 2208 bp, synthetic construct
  misc_feature 1..2208: note = source = /note="Description of Artificial Sequence: Synthetic polynucleotide"
  source 1..2208: mol_type = other DNA
atggctgccgatggttatcttccagattggctcgaggacactctctctgaaggaataagacagtggtggaagctcaaacctggcccaccaccaccaaagcccgcagagcggcatagggacgacagcaggggtcttgtgcttcctgggtacaagtacctcggacccttcaacggactcgacaagggagagccggtcaacgaggcagacgccgcggccctcgagcacgacaaagcctacgaccggcagctcgacagcggagacaacccgtacctcaagtacaaccacgccgacgcggagtttcaggagcgccttaaagaagatacgtcttttgggggcaacctcggacgagcagtcttccaggcgaaaaagagggttcttgaacctctgggcctggttgaggaacctgttaagacggctccgggaaaaaagaggccggtagagcactctcctgtggagccagactcctcctcgggaaccggaaaggcgggccagcagcctgcaagaaaaagattgaattttggtcagactggagacgcagactcagtacctgacccccagcctctcggacagccaccagcagccccctctggtctgggaactaatacgatggctacaggcagtggcgcaccaatggcagacaataacgagggcgccgacggagtgggtaattcctcgggaaattggcattgcgattccacatggatgggcgacagagtcatcaccaccagcacccgaacctgggccctgcccacctacaacaaccacctctacaaacaaatttccagccaatcaggagcctcgaacggcaatcactactttggctacagcaccccttgggggtattttgacttcaacagattccactgccacttttcaccacgtgactggcaaagactcatcaacaacaactggggattccgacccaagagactcaacttcaagctctttaacattcaagtcaaagaggtcacgcagaatgacggtacgacgacgattgccaataaccttaccagcacggttcaggtgtttactgactcggagtaccagctcccgtacgtcctcggctcggcgcatcaaggatgcctcccgccgttcccagcagacgtcttcatggtgccacagtatggatacctcaccctgaacaacgggagtcaggcagtaggacgctcttcattttactgcctggagtactttccttctcagatgctgcgtaccggaaacaactttaccttcagctacacttttgaggacgttcctttccacagcagctacgctcacagccagagtctggaccgtctcatgaatcctctcatcgaccagtacctgtattacttgagcagaacaaacactccaagtggaaccaccacgcagtcaaggcttcagttttctcaggccggagcgagtgacattcgggaccagtctaggaactggcttcctggaccctgttaccgccagcagcgagtatcaaagacatctgcggataacaacaacagtgaatactcgtggactggagctaccaagtaccacctcaatggcagagactctctggtgaatccgggcccggccatggcaagccacaaggacgatgaagaaaagttttttcctcagagcggggttctcatctttgggaagcaaggctcagagaaaacaaatgtggacattgaaaaggtcatgattacagacgaaggggaaatcaggacaaccaatcccgtggctacggagcagtatggttctgtatctaccaacctccagaggggcaacagacaagcagctaccgcagatgtcaacacacaaggcgttcttccaggcatggtctggcaggacagagatgtgtaccttcaggggcccatctgggcaaagattccacacacggacggacattttcacccctctcccctcatgggtggattcggacttaaacaccctcctccacagattctcatcaagaacaccccggtacctgcgaatccttcgaccaccttcagtgcggcaaagtttgcttccttcatcacacagtactccacgggacaggtcagcgtggagatcgagtgggagctgcagaaggaaaacagcaaacgctggaatcccgaaattcagtacacttccaactacaacaagtctgttaatgtggactttactgtggacactaatggcgtgtattcagagcctcgccccattggcaccagatacctgactcgtaatctgtaa

SEQ ID NO: 4352 - DNA, 2208 bp, synthetic construct
  misc_feature 1..2208: note = source = /note="Description of Artificial Sequence: Synthetic polynucleotide"
  source 1..2208: mol_type = other DNA
atggctgccgatggttatcttccagattggctcgaggacactctctctgaaggaataagacagtggtggaagctcaaacctggcccaccaccaccaaagcccgcagagcggcatagggacgacagcaggggtcttgtgcttcctgggtacaagtacctcggacccttcaacggactcgacaagggagagccggtcaacgaggcagacgccgcggccctcgagcacgacaaagcctacgaccggcagctcgacagcggagacaacccgtacctcaagtacaaccacgccgacgcggagtttcaggagcgccttaaagaagatacgtcttttgggggcaacctcggacgagcagtcttccaggcgaaaaagagggttcttgaacctctgggcctggttgaggaacctgttaagacggctccgggaaaaaagaggccggtagagcactctcctgtggagccagactcctcctcgggaaccggaaaggcgggccagcagcctgcaagaaaaagattgaattttggtcagactggagacgcagactcagtacctgacccccagcctctcggacagccaccagcagccccctctggtctgggaactaatacgatggctacaggcagtggcgcaccaatggcagacaataacgagggcgccgacggagtgggtaattcctcgggaaattggcattgcgattccacatggatgggcgacagagtcatcaccaccagcacccgaacctgggccctgcccacctacaacaaccacctctacaaacaaatttccagccaatcaggagcctcgaacggcaatcactactttggctacagcaccccttgggggtattttgacttcaacagattccactgccacttttcaccacgtgactggcaaagactcatcaacaacaactggggattccgacccaagagactcaacttcaagctctttaacattcaagtcaaagaggtcacgcagaatgacggtacgacgacgattgccaataaccttaccagcacggttcaggtgtttactgactcggagtaccagctcccgtacgtcctcggctcggcgcatcaaggatgcctcccgccgttcccagcagacgtcttcatggtgccacagtatggatacctcaccctgaacaacgggagtcaggcagtaggacgctcttcattttactgcctggagtactttccttctcagatgctgcgtaccggaaacaactttaccttcagctacacttttgaggacgttcctttccacagcagctacgctcacagccagagtctggaccgtctcatgaatcctctcatcgaccagtacctgtattacttgagcagaacaaacactccaagtggaaccaccacgcagtcaaggcttcagttttctcaggccggagcgagtgacattcgggaccagtctaggaactggcttcctggaccctgttaccgccagcagcgagtatcaaagacatctgcggataacaacaacagtgaatactcgtggactggagctaccaagtaccacctcaatggcagagactctctggtgaatccgggcccggccatggcaagccacaaggacgatgaagaaaagttttttcctcagagcggggttctcatctttgggaagcaaggctcagagaaaacaaatgtggacattgaaaaggtcatgattacagacgaagaggaaatcaggacaaccaatcccgtggctacggagcagtatggttctgtatctaccaacctccagaggggcaacagacaagcagctaccgcagatgtcaacacacaaggcgttcttccaggcatggtctggcaggacagagatgtgtaccttcaggggcccatctgggcaaagattccacacacggacggacattttcacccctctccccccatgggtggattcggacttaaacaccctcctccacagattctcatcaagaacaccccggtacctgcgaatccttcgaccaccttcagtgcggcaaagtttgcttccttcatcacacagtactccacgggacaggtcagcgtggagatcgagtgggagctgcagaaggaaaacagcaaacgctggaatcccgaaattcagtacacttccaactacaacaagtctgttaatgtggactttactgtggacactaatggcgtgtattcagagcctcgccccattggcaccagatacctgactcgtaatctgtaa

SEQ ID NO: 4353 - DNA, 2208 bp, synthetic construct
  misc_feature 1..2208: note = source = /note="Description of Artificial Sequence: Synthetic polynucleotide"
  source 1..2208: mol_type = other DNA
atggctgccgatggttatcttccagattggctcgaggacactctctctgaaggaataagacagtggtggaagctcaaacctggcccaccaccaccaaagcccgcagagcggcatagggacgacagcaggggtcttgtgcttcctgggtacaagtacctcggacccttcaacggactcgacaagggagagccggtcaacgaggcagacgccgcggccctcgagcacgacaaagcctacgaccggcagctcgacagcggagacaacccgtacctcaagtacaaccacgccgacgcggagtttcaggagcgccttaaagaagatacgtcttttgggggcaacctcggacgagcagtcttccaggcgaaaaagagggttcttgaacctctgggcctggttgaggaacctgttaagacggctccgggaaaaaagaggccggtagagcactctcctgtggagccagactcctcctcgggaaccggaaaggcgggccagcagcctgcaagaaaaagattgaattttggtcagactggagacgcagactcagtacctgacccccagcctctcggacagccaccagcagccccctctggtctgggaactaatacgatggctacaggcagtggcgcaccaatggcagacaataacgagggcgccgacggagtgggtaattcctcgggaaattggcattgcgattccacatggatgggcgacagagtcatcaccaccagcacccgaacctgggccctgcccacctacaacaaccacctctacaaacaaatttccagccaatcaggagcctcgaacggcaatcactactttggctacagcaccccttgggggtattttgacttcaacagattccactgccacttttcaccacgtgactggcaaagactcatcaacaacaactggggattccgacccaagagactcaacttcaagctctttaacattcaagtcaaagaggtcacgcagaatgacggtacgacgacgattgccaataaccttaccagcacggttcaggtgtttactgactcggagtaccagctcccgtacgtcctcggctcggcgcatcaaggatgcctcccgccgttcccagcagacgtcttcatggtgccacagtatggatacctcaccctgaacaacgggagtcaggcagtaggacgctcttcattttactgcctggagtactttccttctcagatgctgcgtaccggaaacaactttaccttcagctacacttttgaggacgttcctttccacagcagctacgctcacagccagagtctggaccgtctcatgaatcctctcatcgaccagtacctgtattacttgagcagaacaaacactccaagtggaaccaccacgcagtcaaggcttcagttttctcaggccggagcgagtgacattcgggaccagtctaggaactggcttcctggaccctgttaccgccagcagcgagtatcaaagacatctgcggataacaacaacagtgaatactcgtggactggagctaccaagtaccacctcaatggcagagactctctggtgaatccgggcccggccatggcaagccacaaggacgatgaagaaaagttttttcctcagagcggggttctcatctttgggaagcaaggctcagagaaaacaaatgtggacattgaaaaggtcatgattacagacgaagaggaaatcaggacaaccaatcccgtggctacggagcagtatggttctgtatctaccaacctccagaggggcaacagacaagcagctaccgcagatgtcaacacacaaggcgttcttccaggcatggtctggcaggacagagatgtgtaccttcaggggcccatctgggcaaagattccacacacggacggacattttcacccctctcccctcatgggtggattcggacttaaacaccctcctccacagattctcatcaagaacaccccggtacctgcgaatccttcgaccaccttcagtgcggcaaagtttgcttccttcatcacacagtactccacgggacaggtcagcgtggagatcgagtgggagctgcagaaggaaaacagcaaacgctggaatcccgaaattcagtacacttccgactacaacaagtctgttaatgtggactttactgtggacactaatggcgtgtattcagagcctcgccccattggcaccagatacctgactcgtaatctgtaa

SEQ ID NO: 4354 - DNA, 2208 bp, synthetic construct
  misc_feature 1..2208: note = source = /note="Description of Artificial Sequence: Synthetic polynucleotide"
  source 1..2208: mol_type = other DNA
atggctgccgatggttatcttccagattggctcgaggacactctctctgaaggaataagacagtggtggaagctcaaacctggcccaccaccaccaaagcccgcagagcggcatagggacgacagcaggggtcttgtgcttcctgggtacaagtacctcggacccttcaacggactcgacaagggagagccggtcaacgaggcagacgccgcggccctcgagcacgacaaagcctacgaccggcagctcgacagcggagacaacccgtacctcaagtacaaccacgccgacgcggagtttcaggagcgccttaaagaagatacgtcttttgggggcaacctcggacgagcagtcttccaggcgaaaaagagggttcttgaacctctgggcctggttgaggaacctgttaagacggctccgggaaaaaagaggccggtagagcactctcctgtggagccagactcctcctcgggaaccggaaaggcgggccagcagcctgcaagaaaaagattgaattttggtcagactggagacgcagactcagtacctgacccccagcctctcggacagccaccagcagccccctctggtctgggaactaatacgatggctacaggcagtggcgcaccaatggcagacaataacgagggcgccgacggagtgggtaattcctcgggaaattggcattgcgattccacatggatgggcgacagagtcatcaccaccagcacccgaacctgggccctgcccacctacaacaaccacctctacaaacaaatttccagccaatcaggagcctcgaacggcaatcactactttggctacagcaccccttgggggtattttgacttcaacagattccactgccacttttcaccacgtgactggcaaagactcatcaacaacaactggggattccgacccaagagactcaacttcaagctctttaacattcaagtcaaagaggtcacgcagaatggcggtacgacgacgattgccaataaccttaccagcacggttcaggtgtttactgactcggagtaccagctcccgtacgtcctcggctcggcgcatcaaggatgcctcccgccgttcccagcagacgtcttcatggtgccacagtatggatacctcaccctgaacaacgggagtcaggcagtaggacgctcttcattttactgcctggagtactttccttctcagatgctgcgtaccggaaacaactttaccttcagctacacttttgaggacgttcctttccacagcagctacgctcacagccagagtctggaccgtctcatgaatcctctcatcgaccagtacctgtattacttgagcagaacaaacactccaagtggaaccaccacgcagtcaaggcttcagttttctcaggccggagcgagtgacattcgggaccagtctaggaactggcttcctggaccctgttaccgccagcagcgagtatcaaagacatctgcggataacaacaacagtgaatactcgtggactggagctaccaagtaccacctcaatggcagagactctctggtgaatccgggcccggccatggcaagccacaaggacgatgaagaaaagttttttcctcagagcggggttctcatctttgggaagcaaggctcagagaaaacaaatgtggacattgaaaaggtcatgattacagacgaagaggaaatcaggacaaccaatcccgtggctacggagcagtatggttctgtatctaccaacctccagaggggcaacagacaagcagctaccgcagatgtcaacacacaaggcgttcttccaggcatggtctggcaggacagagatgtgtaccttcaggggcccatctgggcaaagattccacacacggacggacattttcacccctctcccctcatgggtggattcggacttaaacaccctcctccacagattctcatcaagaacaccccggtacctgcgaatccttcgaccaccttcagtgcggcaaagtttgcttccttcatcacacagtactccacgggacaggtcagcgtggagatcgagtgggagctgcagaaggaaaacagcaaacgctggaatcccgaaattcagtacacttccaactacaacaagtctgttaatgtggactttactgtggacactaatggcgtgtattcagagcctcgccccattggcaccagatacctgactcgtaatctgtaa

SEQ ID NO: 4355 - DNA, 2208 bp, synthetic construct
  misc_feature 1..2208: note = source = /note="Description of Artificial Sequence: Synthetic polynucleotide"
  source 1..2208: mol_type = other DNA
atggctgccgatggttatcttccagattggctcgaggacactctctctgaaggaataagacagtggtggaagctcaaacctggcccaccaccaccaaagcccgcagagcggcatagggacgacagcaggggtcttgtgcttcctgggtacaagtacctcggacccttcaacggactcgacaagggagagccggtcaacgaggcagacgccgcggccctcgagcacgacaaagcctacgaccggcagctcgacagcggagacaacccgtacctcaagtacaaccacgccgacgcggagtttcaggagcgccttaaagaagatacgtcttttgggggcaacctcggacgagcagtcttccaggcgaaaaagagggttcttgaacctctgggcctggttgaggaacctgttaagacggctccgggaaaaaagaggccggtagagcactctcctgtggagccagactcctcctcgggaaccggaaaggcgggccagcagcctgcaagaaaaagattgaattttggtcagactggagacgcagactcagtacctgacccccagcctctcggacagccaccagcagccccctctggtctgggaactaatacgatggctacaggcagtggcgcaccaatggcagacaataacgagggcgccgacggagtgggtaattcctcgggaaattggcattgcgattccacatggatgggcgacagagtcatcaccaccagcacccgaacctgggccctgcccacctacaacaaccacctctacaaacaaatttccagccaatcaggagcctcgaacggcaatcactactttggctacagcaccccttgggggtattttgacttcaacagattccactgccacttttcaccacgtgactggcaaagactcatcaacaacaactggggattccgacccaagagactcaacttcaagctctttaacattcaagtcaaagaggtcacgcagaatgacggtacgacgacgattgccaataaccttaccagcacggttcaggtgtttactgactcggagtaccagctcccgtacgtcctcggctcggcgcatcaaggatgcctcccgccgttcccagcagacgtcttcatggtgccacagtatggatacctcaccctgaacaacgggagtcaggcagtaggacgctcttcattttactgcctggagtactttccttctcagatgctgcgtaccggaaacaactttaccttcagctacacttttgaggacgttcctttccacagcagctacgctcacagccagagtctggaccgtctcatgaatcctctcatcgaccagtacctgtattacttgagcagaacaaacactccaagtggaaccaccacgcagtcaaggcttcagttttctcaggccgtagcgagtgacgttcgggaccagtctaggaactggcttcctggaccctgttaccgccagcagcgagtatcaaagacatctgcggataacaacaacagtgaatactcgtggactggagctaccaagtaccacctcaatggcagagactctctggtgaatccgggcccggccatggcaagccacaaggacgatgaagaaaagttttttcctcagagcggggttctcatctttgggaagcaaggctcagagaaaacaaatgtggacattgaaaaggtcatgattacagacgaagaggaaatcaggacaaccaatcccgtggctacggagcagtatggttctgtatctaccaacctccagaggggcaacagacaagcagctaccgcagatgtcaacacacaaggcgttcttccaggcatggtctggcaggacagagatgtgtaccttcaggggcccatctgggcaaagattccacacacggacggacattttcacccctctcccctcatgggtggattcggacttaaacaccctcctccacagattctcatcaagaacaccccggtacctgcgaatccttcgaccaccttcagtgcggcaaagtttgcttccttcatcacacagtactccacgggacaggtcagcgtggagatcgagtgggagctgcagaaggaaaacagcaaacgctggaatcccgaaattcagtacacttccaactacaacaagtctgttaatgtggactttactgtggacactaatggcgtgtattcagagcctcgccccattggcaccagatacctgactcgtaatctgtaa

SEQ ID NO: 4356 - DNA, 2208 bp, synthetic construct
  misc_feature 1..2208: note = source = /note="Description of Artificial Sequence: Synthetic polynucleotide"
  source 1..2208: mol_type = other DNA
atggctgccgatggttatcttccagattggctcgaggacactctctctgaaggaataagacagcggtggaagctcaaacctggcccaccaccaccaaagcccgcagagcggcatagggacgacagcaggggtcttgtgcttcctgggtacaagtacctcggacccttcaacggactcgacaagggagagccggtcaacgaggcagacgccgcggccctcgagcacgacaaagcctacgaccggcagctcgacagcggagacaacccgtacctcaagtacaaccacgccgacgcggagtttcaggagcgccttaaagaagatacgtcttttgggggcaacctcggacgagcagtcttccaggcgaaaaagagggttcttgaacctctgggcctggttgaggaacctgttaagacggctccgggaaaaaagaggccggtagagcactctcctgtggagccagactcctcctcgggaaccggaaaggcgggccagcagcctgcaagaaaaagattgaattttggtcagactggagacgcagactcagtacctgacccccagcctctcggacagccaccagcagccccctctggtctgggaactaatacgatggctacaggcagtggcgcaccaatggcagacaataacgagggcgccgacggagtgggtaattcctcgggaaattggcattgcgattccacatggatgggcgacagagtcatcaccaccagcacccgaacctgggccctgcccacctacaacaaccacctctacaaacaaatttccagccaatcaggagcctcgaacggcaatcactactttggctacagcaccccttgggggtattttgacttcaacagattccactgccacttttcaccacgtgactggcaaagactcatcaacaacaactggggattccgacccaagagactcaacttcaagctctttaacattcaagtcaaagaggtcacgcagaatgacggtacgacgacgattgccaataaccttaccagcacggttcaggtgtttactgactcggagtaccagctcccgtacgtcctcggctcggcgcatcaaggatgcctcccgccgttcccagcagacgtcttcatggtgccacagtatggatacctcaccctgaacaacgggagtcaggcagtaggacgctcttcattttactgcctggagtactttccttctcagatgctgcgtaccggaaacaactttaccttcagctacacttttgaggacgttcctttccacagcagctacgctcacagccagagtctggaccgtctcatgaatcctctcatcgaccagtacctgtattacttgagcagaacaaacactccaagtggaaccaccacgcagtcaaggcttcagttttctcaggccggagcgagtgacattcgggaccagtctaggaactggcttcctggaccctgttaccgccagcagcgagtatcaaagacatctgcggataacaacaacagtgaatactcgtggactggagctaccaagtaccacctcaatggcagagactctctggtgaatccgggcccggccatggcaagccacaaggacgatgaagaaaagttttttcctcagagcggggttctcatctttgggaagcaaggctcagagaaaacaaatgtggacattgaaaaggtcatgattacagacgaagaggaaatcaggacaaccaatcccgtggctacggagcagtatggttctgtatctaccaacctccagaggggcaacagacaagcagctaccgcagatgtcaacacacaaggcgttcttccaggcatggtctggcaggacagagatgtgtaccttcaggggcccatctgggcaaagattccacacacggacggacattttcacccctctcccctcatgggtggattcggacttaaacaccctcctccacagattctcatcaagaacaccccggtacctgcgaatccttcgaccaccttcagtgcggcaaagtttgcttccttcatcacacagtactccacgggacaggtcagcgtggagatcgagtgggagctgcagaaggaaaacagcaaacgctggaatcccgaaattcagtacacttccaactacaacaagtctgttaatgtggactttactgtggacactaatggcgtgtattcagagcctcgccccattggcaccagatacctgactcgtaatctgtaa

SEQ ID NO: 4357 - DNA, 2208 bp, synthetic construct
  misc_feature 1..2208: note = source = /note="Description of Artificial Sequence: Synthetic polynucleotide"
  source 1..2208: mol_type = other DNA
atggctgccgatggttatcttccagattggctcgaggacactctctctgaaggaataagacagtggtggaagctcaaacctggcccaccaccaccaaagcccgcagagcggcataaggacgacagcaggggtcttgtgcttcctgggtacaagtacctcggacccttcaacggactcgacaagggagagccggtcaacgaggcagacgccgcggccctcgagcacgacaaagcctacgaccggcagctcgacagcggagacaacccgtacctcaagtacaaccacgccgacgcggagtttcaggagcgccttaaagaagatacgtcttttgggggcaacctcggacgagcagtcttccaggcgaaaaagagggttcttgaacctctgggcctggttgaggaacctgttaagacggctccgggaaaaaagaggccggtagagcactctcctgtggagccagactcctcctcgggaaccggaaaggcgggccagcagcctgcaagaaaaagattgaattttggtcagactggagacgcagactcagtacctgacccccagcctctcggacagccaccagcagccccctctggtctgggaactaatacgatggctacaggcagtggcgcaccaatggcagacaataacgagggcgccgacggagtgggtaattcctcgggaaattggcattgcgattccacatggatgggcgacagagtcatcaccaccagcacccgaacctgggccctgcccacctacaacaaccacctctacaaacaaatttccagccaatcaggagcctcgaacgacaatcactactttggctacagcaccccttgggggtattttgacttcaacagattccactgccacttttcaccacgtgactggcaaagactcatcaacaacaactggggattccgacccaagagactcaacttcaagctctttaacattcaagtcaaagaggtcacgcagaatgacggtacgacgacgattgccaataaccttaccagcacggttcaggtgtttactgactcggagtaccagctcccgtacgtcctcggctcggcgcatcaaggatgcctcccgccgttcccagcagacgtcttcatggtgccacagtatggatacctcaccctgaacaacgggagtcaggcagtaggacgctcttcattttactgcctggagtactttccttctcagatgctgcgtaccggaaacaactttaccttcagctacacttttgaggacgttcctttccacagcagctacgctcacagccagagtctggaccgtctcatgaatcctctcatcgaccagtacctgtattacttgagcagaacaaacactccaagtggaaccaccacgcagtcaaggcttcagttttctcaggccggagcgagtgacattcgggaccagtctaggaactggcttcctggaccctgttaccgccagcagcgagtatcaaagacatctgcggataacaacaacagtgaatactcgtggactggagctaccaagtaccacctcaatggcagagactctctggtgaatccgggcccggccatggcaagccacaaggacgatgaagaaaagttttttcctcagagcggggttctcatctttgggaagcaaggctcagagaaaacaaatgtggacattgaaaaggtcatgactacagacgaagaggaaatcaggacaaccaatcccgtggctacggagcagtatggttctgtatctaccaacctccagaggggcaacagacaagcagctaccgcagatgtcaacacacaaggcgttcttccaggcatggtctggcaggacagagatgtgtaccttcaggggcccatctgggcaaagattccacacacggacggacattttcacccctctcccctcatgggtggattcggacttaaacaccctcctccacagattctcatcaagaacaccccggtacctgcgaatccttcgaccaccttcagtgcggcaaagtttgcttccttcatcacacagtactccacgggacaggtcagcgtggagatcgagtgggagctgcagaaggaaaacagcaaacgctggaatcccgaaattcagtacacttccaactacaacaagtctgttaatgtggactttactgtggacactaatggcgtgtattcagagcctcgccccattggcaccagatacctgactcgtaatctgtaa

SEQ ID NO: 4358 - DNA, 2208 bp, synthetic construct
  misc_feature 1..2208: note = source = /note="Description of Artificial Sequence: Synthetic polynucleotide"
  source 1..2208: mol_type = other DNA
atggctgccgatggttatcttccagattggctcgaggacactctctctgaaggaataagacagtggtggaagctcaaacctggcccaccaccaccaaagcccgcagagcggcataaggacgacagcaggggtcttgtgcttcctgggtacaagtacctcggacccttcaacggactcgacaagggagagccggtcaacgaggcagacgccgcggccctcgagcacgacaaagcctacgaccggcagctcgacagcggagacaacccgtacctcaagtacaaccacgccgacgcggagtttcaggagcgccttaaagaagatacgtcttttgggggcaacctcggacgagcagtcttccaggcgaaaaagagggttcttgaacctccgggcctggttgaggaacctgttaagacggctccgggaaaaaagaggccggtagagcactctcctgtggagccagactcctcctcgggaaccggaaaggcgggccagcagcctgcaagaaaaagattgaattttggtcagactggagacgcagactcagtacctgacccccagcctctcggacagccaccagcagccccctctggtctgggaactaatacgatggctacaggcagtggcgcaccaatggcagacaataacgagggcgccgacggagtgggtaattcctcgggaaattggcattgcgattccacatggatgggcgacagagtcatcaccaccagcacccgaacctgggccctgcccacctacaacaaccacctctacaaacaaatttccagccaatcaggagcctcgaacgacaatcactactttggctacagcaccccttgggggtattttgacttcaacagattccactgccacttttcaccacgtgactggcaaagactcatcaacaacaactggggattccgacccaagagactcaacttcaagctctttaacattcaagtcaaagaggtcacgcagaatgacggtacgacgacgattgccaataaccttaccagcacggttcaggtgtttactgactcggagtaccagctcccgtacgtcctcggctcggcgcatcaaggatgcctcccgccgttcccagcagacgtcttcatggtgccacagtatggatacctcaccctgaacaacgggagtcaggcagtaggacgctcttcattttactgcctggagtactttccttctcagatgctgcgtaccggaaacaactttaccttcagctacacttttgaggacgttcctttccacagcagctacgctcacagccagagtctggaccgtctcatgaatcctctcatcgaccagtacctgtattacttgagcagaacaaacactccaagtggaaccaccacgcagtcaaggcttcagttttctcaggccggagcgagtgacattcgggaccagtctaggaactggcttcctggaccctgttaccgccagcagcgagtatcaaagacatctgcggataacaacaacagtgaatactcgtggactggagctaccaagtaccacctcaatggcagagactctctggtgaatccgggcccggccatggcaagccacaaggacgatgaagaaaagttttttcctcagagcggggttctcatctttgggaagcaaggctcagagaaaacaaatgtggacattgaaaaggtcatgactacagacgaagaggaaatcaggacaaccaatcccgtggctacggagcagtatggttctgtatctaccaacctccagagaggcaacagacaagcagctaccgcagatgtcaacacacaaggcgttcttccaggcatggtctggcaggacagagatgtgtaccttcaggggcccatctgggcaaagattccacacacggacggacattttcacccctctcccctcatgggtggattcggacttaaacaccctcctccacagattctcatcaagaacaccccggtacctgcgaatccttcgaccaccttcagtgcggcaaagtttgcttccttcatcacacagtactccacgggacaggtcagcgtggagatcgagtgggagctgcagaaggaaaacagcaaacgctggaatcccgaaattcagtacacttccaactacaacaagtctgttaatgtggactttactgtggacactaatggcgtgtattcagagcctcgccccattggcaccagatacctgactcgtaatctgtaa

SEQ ID NO: 4359 - DNA, 2208 bp, synthetic construct
  misc_feature 1..2208: note = source = /note="Description of Artificial Sequence: Synthetic polynucleotide"
  source 1..2208: mol_type = other DNA
atggctgccgatggttatcttccagattggctcgaggacactctctctgaaggaataagacagtggtggaagctcaaacctggcccaccaccaccaaagcccgcagagcggcataaggacgacagcaggggtcttgtgcttcctgggtacaagtacctcggacccttcaacggactcgacaagggagagccggtcaacgaggcagacgccgcggccctcgagcacgacaaagcctacgaccggcagctcgacagcggagacaacccgtacctcaagtacaaccacgccgacgcggagtttcaggagcgccttaaagaagatacgtcttttgggggcaacctcggacgagcagtcttccaggcgaaaaagagggttcttgaacctctgggcctggttgaggaacctgttaagacggctccgggaaaaaagaggccggtagagcactctcctgtggagccagactcctcctcgggaaccggaaaggcgggccagcagcctgcaagaaaaagattgaattttggtcagactggagacgcagactcagtacctgacccccagcctctcggacagccaccagcagccccctctggtctgggaactaatacgatggctacaggcagtggcgcaccaatggcagacaataacgagggcgccgacggagtgggtaattcctcgggaaattggcattgcgattccacatggatgggcgacagagtcatcaccaccagcacccgaacctgggccctgcccacctacaacaaccacctctacaaacaaatttccagccaatcaggagcctcgaacgacaatcactactttggctacagcaccccttgggggtattttgacttcaacagattccactgccacttttcaccacgtgactggcaaagactcatcaacaacaactggggattccgacccaagagactcaacttcaagctctttaacattcaagtcaaagaggtcacgcagaatgacggtacgacgacgattgccaataaccttaccagcacggttcaggtgtttactgactcggagtaccagctcccgtacgtcctcggctcggcgcatcaaggatgcctcccgccgttcccagcagacgtcttcatggtgccacagtatggatacctcaccctgaacaacgggagtcaggcagtaggacgctcttcattttactgcctggagtactttccttctcagatgctgcgtaccggaaacaactttaccttcagctacacttttgaggacgttcctttccacagcagctacgctcacagccagagtctggaccgtctcatgaatcctctcatcgaccagtacctgtattacttgagcagaacaaacactccaagtggaaccaccacgcagtcaaggcttcagttttctcaggccggagcgagtgacattcgggaccagtctaggaactggcttcctggaccctgttaccgccagcagcgagtatcaaagacatctgcggataacaacaacagtgaatactcgtggactggagctaccaagtaccacctcaatggcagagactctctggtgaatccgggcccggccatggcaagccacaaggacgatgaagaaaagttttttcctcagagcggggttctcatctttgggaagcaaggctcagagaaaacaaatgtggacattgaaaaggtcatgactacagacgaagaggaaatcaggacaaccaatcccgtggctacggagcagtatggttctgtatctaccaacctccagagaggcaacagacaagcagctaccgcagatgtcaacacacaaggcgttcttccaggcatggtctggcaggacagagatgtgtaccttcaggggcccatctgggcaaagattccacacacggacggacattttcacccctctcccctcatgggtggattcggacttaaacaccctcctccacagattctcatcaagaacaccccggtacctgcgaatccttcgaccaccttcagtgcggcaaagtttgcttccttcatcacacagtactccacgggacaggtcagcgtggagatcgagtgggagctgcagaaggaaaacggcaaacgctggaatcccgaaattcagtacacttccaactacaacaagtctgttaatgtggactttactgtggacactaatggcgtgtattcagagcctcgccccattggcaccagatacctgactcgtaatctgtaa

SEQ ID NO: 4360 - DNA, 2208 bp, synthetic construct
  misc_feature 1..2208: note = source = /note="Description of Artificial Sequence: Synthetic polynucleotide"
  source 1..2208: mol_type = other DNA
atggctgccgatggttatcttccagattggctcgaggacactctctctgaaggaataagacagtggtggaagctcaaacctggcccaccaccgccagagcccgcagagcggcacaaggacgacagtaggggtcttgtgcttcctgggtacaagtacctcggacccttcaacggactcgacaaaggagagccggtcaacgaggcagacgccgcggccctcgagcacgacaaggcctacgaccggcagctcgacagcggagacaacccgtacctcaagtacaaccacgccgacgcggagtttcaggagcgtcttaaagaagatacgtcttttgggggcaacctcggacgagcagtattccaggcgaaaaagagggttcttgaacctctgggcctggttgaggagcctgttaagacggctccgggaaaaaagaggccggtagagcactctcctgtggagccagactcctcctcgggaaccggaaaagcgggccagcagcctgcaagaaaaagattgaattttggtcagactggagacgcagactccgtacctgacccccagcctctcggacagccaccagcagcccccacaagtttgggatctactacaatggctacaggcagtggcgcaccaatggcagacaataacgagggtgccgatggagtgggtaattcctcaggaaattggcattgcgattcccaatggctgggcgacagagtcatcaccaccagcacccgaacctgggccctgcccacctacaacaaccacctctacaagcaaatctccagccaatcaggagcatcgaacgacaaccactactttggccacagcaccccttgggggtattttgacttcaacagattccactgtcacttctccccacgtgactggcaaagactcatcaacaacaactggggattccgacccaagagactcaacttcaagctctttaacattcaagtcaaagaggtcacgcagaatgacggtacgacgacgattgccaataaccttaccagcacggttcaggtgtttactgactcggagtaccagctcccgtacgtcctcggctcggcgcatcaaggatgcctcccgccgttcccagcagacgtcttcatggtcccacagtatggatacctcaccctgaacaacgggagtcaggcggtaggacgctcttccttttactgcctggagtactttccttctcagatgcttcgtaccggaaacaactttaccttcagctacacctttgaagacgtgcctttccacagtagctacgctcacagccagagtctggatcggctgatgaatcctcttatcgaccagtacctgtattatctaaacaaaacacaatcaaatagtggaactcttcagcagtctcggctactgtttagtcaagctggacccaccagcatgtctcttcaagctaaaaactggctgcctggaccttgctacagacaacagcgtctgtcaaagcaggcaaacgacaacaacaacagcaactttccctggactgcggctacaaagtatcatctaaatggccgggactcgttggttaatccaggaccagctatggccagccacaaagacgatgaagaaaagtttttccccatgcatggaaccctgatatttggtaaacaaggaacaaatgctaacgacgcggatttggacaatgtcatgattacagatgaagaagaaatccgcaccaccaatcccgtggctacggagcagtacgggactgtgtcaaataatttgcaaaactcaaatactggtccaactactggaactgtcaatcaccaaggagcgttacctggtatggtgtggcaggatcgagacgtgtacctgcagggacccatttgggccaagattcctcacaccgatggacactttcatccttctccactgatgggaggttttggactcaaacacccgcctcctcagatcatgatcaaaaacactcccgttccagccaatcctcctacaaacttcagttctgccaagtttgcttccttcatcacacagtattccacgggacaagtcagcgtggagattgagtgggagctgcagaaggagaacagcaaacgctggaaccccgagatccagtacacttccaactacaacaaatctgttaatgtggactttactgtggacactaatggcgtgtattcagagcctcgccccattggcaccagatacctgactcgtaatctgtaa

SEQ ID NO: 4361 - DNA, 2208 bp, synthetic construct
  misc_feature 1..2208: note = source = /note="Description of Artificial Sequence: Synthetic polynucleotide"
  source 1..2208: mol_type = other DNA
atggctgccgatggttatcttccagattggctcgaggacactctctctgaaggaataagacagtggtggaagctcaaacctggcccaccaccgccaaagcccgcagagcggcacaaggacgacagtaggggtcttgtgcttcctgggtacaagtacctcggacccttcaacggactcgacaaaggagagccggtcaacgaggcagacgccgcggccctcgagcacgacaaggcctacgaccggcagctcgacagcggagacaacccgtacctcaagtacaaccacgccgacgcggagtttcaggagcgtcttaaagaagatacgtcttttgggggcaacctcggacgagcagtattccaggcgaaaaagagggttcttgaacctctgggcctggttgaggagcctgttaagacggctccgggaaaaaagaggccggtagagcactctcctgtggagccagactcctcctcgggaaccggaaaagcgggccagcagcctgcaagaaaaagattgaattttggtcagactggagacgcagactccgtacctgacccccagcctctcggacagccaccagcagcccccacaagtttgggatctactacaatggctacaggcagtggcgcaccaatggcagacaataacgagggtgccgatggagtgggtaattcctcaggaaattggcattgcgattcccaatggctgggcgacagagtcatcaccaccagcacccgaacctgggccctgcccacctacaacaaccacctctacaagcaaatctccagccaatcaggagcatcgaacgacaaccactactttggccacagcaccccttgggggtattttgacttcaacagattccactgtcacttctccccacgtgactggcaaagactcatcaacaacaactggggattccgacccaagagactcaacttcaagctctttaacattcaagtcaaagaggtcacgcagaatgacggtacgacgacgattgccaataaccttaccagcacggttcaggtgtttactgactcggagtaccagctcccgtacgtcctcggctcggcgcatcaaggatgcctcccgccgttcccagcagacgtcttcatggtctcacagtatggatacctcaccctgaacaacgggagtcaggcggtaggacgctcttccttttactgcctggagtactttccttctcagatgcttcgtaccggaaacaactttaccttcagctacacctttgaagacgtgcctttccacagtagctacgctcacagccagagtctggatcggctgatgaatcctcttatcgaccagtacctgtattatctaaacaaaacacaatcaaatagtggaactcttcagcagtctcggctactgtttagtcaagctggacccaccagcatgtctcttcaagctaaaaactggctgcctggaccttgctacagacaacagcgtctgtcaaagcaggcaaacgacaacaacaacagcaactttccctggactgcggctacaaagtatcatctaaatggccgggactcgttggttaatccaggaccagctatggccagccacaaagacgatgaagaaaagtttttccccatgcatggaaccctgatatttggtaaacaaggaacaaatgctaacgacgcggatttggacaatgtcatgattacagatgaagaagaaatccgcaccaccaatcccgtggctacggagcagtacgggactgtgtcaaataatttgcaaaactcaaatactggtccaactactggaactgtcaatcaccaaggagcgttacctggtatggtgtggcaggatcgagacgtgtacctgcagggacccatttgggccaagattcctcacaccgatggacactttcatccttctccactgatgggaggttttggactcaaacacccgcctcctcagatcatgatcaaaaacactcccgttccagccaatcctcctacaaacttcagttctgccaagtttgcttccttcatcacacagtattccacgggacaagtcagcgtggagattgagtgggagctgcagaaggagaacagcaaacgctggaaccccgagatccagtacacttccaactacaacaaatctgttaatgtggactttactgtggacactaatggcgtgtattcagagcctcgccccattggcaccagatacctgactcgtaatctgtaa

SEQ ID NO: 4362 - DNA, 2208 bp, synthetic construct
  misc_feature 1..2208: note = source = /note="Description of Artificial Sequence: Synthetic polynucleotide"
  source 1..2208: mol_type = other DNA
atggctgccgatggttatcttccagattggctcgaggacactctctctgaaggaataagacagtggtggaagctcaaacctggcccaccaccgccaaagcccgcagagcggcacaaggacgacagtaggggtcttgtgcttcctgggtacaagtacctcggacccttcaacggactcgacaaaggagagccggtcaacgaggcagacgccgcggccctcgagcacgacaaggcctacgaccggcagctcgacagcggagacaacccgtacctcaagtacaaccacgccgacgcggagtttcaggagcgtcttaaagaagatacgtcttttgggggcaacctcggacgagcagtattccaggcgaaaaagagggttcttgaacctctgggcctggttgaggagcctgttaagacggctccgggaaaaaagaggccggtagagcactctcctgtggagccagactcctcctcgggaaccggaaaagcgggccagcagcctgcaagaaaaagattgaattttggtcagactggagacgcagactccgtacctgacccccagcctctcggacagccaccagcagcccccacaagtttgggatctactacaatggctacaggcagtggcgcaccaatggcagacaataacgagggtgccgatggagtgggtaattcctcaggaaattggcattgcgattcccaatggctgggcgacagagtcatcaccaccagcacccgaacctgggccctgcccacctacaacaaccacctctacaagcaaatctccagccaatcaggagcatcgaacgacaaccactactttggccacagcaccccttgggggtattttgacttcaacagattccactgtcacttctccccacgtgactggcaaagactcatcaacaacaactggggattccgacccaagagactcaacttcaagctctttaacattcaagtcaaagaggtcacgcagaatgacggtacgacgacgattgccaataaccttaccagcacggttcaggtgtttactgactcggagtaccagctcccgtacgtcctcggctcggcgcatcaaggatgcctcccgccgttcccagcagacgtcttcatggtctcacagtatggatacctcaccctgaacaacgggagtcaggcggtaggacgctcttccttttactgcctggagtactttccttctcagatgcttcgtaccggaaacaactttaccttcagctacacctttgaagacgtgcctttccacagtagctacgctcacagccagagtctggatcggctgatgaatcctcttatcgaccagtacctgtattatctaaacaaaacacaatcaaatagtggaactcttcagcagtctcggctactgtttagtcaagctggacccaccagcatgtctcttcaagctaaaaactggctgcctggaccttgctacagacaacagcgtctgtcaaagcaggcaaacgacaacaacaacagcaactttccctggactgcggctacaaagtatcatctaaatggccgggactcgttggttaatccaggaccagctatggccagccacaaagacgatgaagaaaagcttttccccatgcatggaaccctgatatttggtaaacaaggaacaaatgctaacgacgcggatttggacaatgtcatgattacagatgaagaagaaatccgcaccaccaatcccgtggctacggagcagtacgggactgtgtcaaataatttgcaaaactcaaatactggtccaactactggaactgtcaatcaccaaggagcgttacctggtatggtgtggcaggatcgagacgtgtacctgcagggacccatttgggccaagattcctcacaccgatggacactttcatccttctccactgatgggaggttttggactcaaacacccgcctcctcagatcatgatcaaaaacactcccgttccagccaatcctcctacaaacttcagttctgccaagtttgcttccttcatcacacagtattccacgggacaagtcagcgtggagattgagtgggagctgcagaaggagaacagcaaacgctggaaccccgagatccagtacacttccaactacaacaaatctgttaatgtggactttactgtggacactaatggcgtgtattcagagcctcgccccattggcaccagatacctgactcgtaatctgtaa

SEQ ID NO: 4363 - DNA, 2208 bp, synthetic construct
  misc_feature 1..2208: note = source = /note="Description of Artificial Sequence: Synthetic polynucleotide"
  source 1..2208: mol_type = other DNA
atggctgccgatggttatcttccagattggctcgaggacactctctctgaaggaataagacagtggtggaagctcaaacctggcccaccaccgccaaagcccgcagagcggcacaaggacgacagtaggggtcttgtgcttcctgggtacaagtacctcggacccttcaacggactcgacaaaggagagccggtcaacgaggcagacgccgcggccctcgagcacgacaaggcctacgaccggcagctcgacagcggagacaacccgtacctcaagtacaaccacgccgacgcggagtttcaggagcgtcttaaagaagatacgtcttttgggggcaacctcggacgagcagtattccaggcgaaaaagagggttcttgaacctctgggcctggttgaggagcctgttaagacggctccgggaaaaaagaggccggtagagcactctcctgtggagccagactcctcctcgggaaccggaaaagcgggccagcagcctgcaagaaaaagattgaattttggtcagactggagacgcagactccgtacctgacccccagcctctcggacagccaccagcagcccccacaagtttgggatctactacaatggctacaggcagtggcgcaccaatggcagacaataacgagggtgccgatggagtgggtaattcctcaggaaattggcattgcgattcccaatggctgggcgacagagtcatcaccaccagcacccgaacctgggccctgcccacctacaacaaccacctctacaagcaaatctccagccaatcaggagcatcgaacgacaaccactactttggccacagcaccccttgggggtattttgacttcaacagattccactgtcacttctccccacgtgactggcaaagactcatcaacaacaactggggattccgacccaagagactcaacttcaagctctttaacattcaagtcaaagaggtcacgcagaatgacggtacgacgacgattgccaataaccttaccagcacggttcaggtgtttactgactcggagtaccagctcccgtacgtcctcggctcggcgcatcaaggatgcctcccgccgttcccagcagacgtcttcatggtcccacagtatggatacctcaccctgaacaacgggagtcaggcggtaggacgctcttccttttactgcctggagtactttccttctcagatgcttcgtaccggaaacaactttaccttcagctacacctttgaagacgtgcctttccacagtagctacgctcacagccagagtctggatcggctgatgaatcctcttatcgaccagtacctgtattatctaaacaaaacacaatcaaatagtggaactcttcagcagtctcggctactgtttagtcaagctggacccaccagcatgtctcttcaagctaaaaactggctgcctggaccttgctacagacaacagcgtctgtcaaagcaggcaaacgacaacaacaacagcaacttttcctggactgcggctacaaagtatcatctaaatggccgggactcgttggttaatccaggaccagctatggccagccacaaagacgatgaagaaaagtttttccccatgcatggaaccctgatatttggtaaacaaggaacaaatgctaacgacgcggatttggacaatgtcatgattacagatgaagaagaaatccgcaccaccaatcccgtggctacggagcagtacgggactgtgtcaaataatttgcaaaactcaaatactggtccaactactggaactgtcaatcaccaaggagcgttacctggtatggtgtggcaggatcgagacgtgtacctgcagggacccatttgggccaagattcctcacaccgatggacactttcatccttctccactgatgggaggttttggactcaaacacccgcctcctcagatcatgatcaaaaacactcccgttccagccaatcctcctacaaacttcagttctgccaagtttgcttccttcatcacacagtattccacgggacaagtcagcgtggagattgagtgggagctgcagaaggagaacagcaaacgctggaaccccgagatccagtacacttccaactacaacaaatctgttaatgtggactttactgtggacactaatggcgtgtattcagagcctcgccccattggcaccagatacctgactcgtaatctgtaa

SEQ ID NO: 4364 - DNA, 2208 bp, synthetic construct
  misc_feature 1..2208: note = source = /note="Description of Artificial Sequence: Synthetic polynucleotide"
  source 1..2208: mol_type = other DNA
atggctgccgatggttatcttccagattggctcgaggacactctctctgaaggaataagacagtggtggaagctcaaacctggcccaccaccgccaaagcccgcagagcggcacaaggacgacagtaggggtcttgtgcttcctgggtacaagtacctcggacccttcaacggactcgacaaaggagagccggtcaacgaggcagacgccgcggccctcgagcacgacaaggcctacgaccggcagctcgacagcggagacaacccgtacctcaagtacaaccacgccgacgcggagtttcaggagcgtcttaaagaagatacgtcttttgggggcaacctcggacgagcagtattccaggcgaaaaagagggttcttgaacctctgggcctggttgaggagcctgttaagacggctccgggaaaaaagaggccggtagagcactctcctgtggagccagactcctcctcgggaaccggaaaagcgggccagcagcctgcaagaaaaagattgaattttggtcagactggagacgcagactccgtacctgacccccagcctctcggacagccaccagcagcccccacaagtttgggatctactacaatggctacaggcagtggcgcaccaatggcagacaataacgagggtgccgatggagtgggtaattcctcaggaaattggcattgcgattcccaatggctgggcgacagagtcatcaccaccagcacccgaacctgggccctgcccacctacaacaaccacctctacaagcaaatctccagccaatcaggagcatcgaacgacaaccactactttggccacagcaccccttgggggtattttgacttcaacagattccactgtcacttctccccacgtgactggcaaagactcatcaacaacaactggggattccgacccaagagactcaacttcaagctctttaacattcaagtcaaagaggtcacgcagaatgacggtacgacgacgattgccaataaccttaccagcacggttcaggtgtttactgactcggagtaccagctcccgtacgtcctcggctcggcgcatcaaggatgcctcccgccgttcccagcagacgtcttcatggtcccacagtatggatacctcaccctgaacaacgggagtcaggcggtaggacgctcttccttttactgcctggagtactttccttctcagatgcttcgtaccggaaacaactttaccttcagctacacctttgaagacgtgcctttccacagtagctacgctcacagccagagtctggatcggctgatgaatcctcttatcgaccagtacctgtattatctaaacaaaacacaatcaaatagtggaactcttcagcagtctcggctactgtttagtcaagctggacccaccagcatgtctcttcaagctaaaaactggctgcctggaccttgctacagacaacagcgtctgtcaaagcaggcaaacgacaacaacaacagcaactttccctggactgcggctacaaagtatcatctaaatggccgggactcgttggttaatccaggaccagctatggccagccacaaagacgatgaagaaaagtttttccccatgcatggaaccctgatatttggtaaacaaggaacaaatgctaacgacgcggatttggacaatgtcatgattacagatgaagaagaaatccgcaccaccaatcccttggctacggagcagtacgggactgtgtcaaataatttgcaaaactcaaatactggtccaactactggaactgtcaatcaccaaggagcgttacctggtatggtgtggcaggatcgagacgtgtacctgcagggacccatttgggccaagattcctcacaccgatggacactttcatccttctccactgatgggaggttttggactcaaacacccgcctcctcagatcatgatcaaaaacactcccgttccagccaatcctcctacaaacttcagttctgccaagtttgcttccttcatcacacagtattccacgggacaagtcagcgtggagattgagtgggagctgcagaaggagaacagcaaacgctggaaccccgagatccagtacacttccaactacaacaaatctgttaatgtggactttactgtggacactaatggcgtgtattcagagcctcgccccattggcaccagatacctgactcgtaatctgtaa

SEQ ID NO: 4365 - DNA, 2208 bp, synthetic construct
  misc_feature 1..2208: note = source = /note="Description of Artificial Sequence: Synthetic polynucleotide"
  source 1..2208: mol_type = other DNA
atggctgccgatggttatcttccagattggctcgaggacactctctctgaaggaataagacagtggtggaagctcaaacctggcccaccaccgccaaagcccgcagagcggcacaaggacgacagtaggggtcttgtgcttcctgggtacaagtacctcggacccttcaacggactcgacaaaggagagccggtcaacgaggcagacgccgcggccctcgagcacgacaaggcctacgaccggcagctcgacagcggagacaacccgtacctcaagtacaaccacgccgacgcggagtttcaggagcgtcttaaagaagatacgtcttttgggggcaacctcggacgagcagtattccaggcgaaaaagagggttcttgaacctctgggcctggttgaggagcctgttaagacggctccgagaaaaaagaggccggtagagcactctcctgtggagccagactcctcctcgggaaccggaaaagcgggccagcagcctgcaagaaaaagattgaattttggtcagactggagacgcagactccgtacctgacccccagcctctcggacagccaccagcagcccccacaagtttgggatctactacaatggctacaggcagtggcgcaccaatggcagacaataacgagggtgccgatggagtgggtaattcctcaggaaattggcattgcgattcccaatggctgggcgacagagtcatcaccaccagcacccgaacctgggccctgcccacctacaacaaccacctctacaagcaaatctccagccaatcaggagcatcgaacgacaaccactactttggccacagcaccccttgggggtattttgacttcaacagattccactgtcacttctccccacgtgactggcaaagactcatcaacaacaactggggattccgacccaagagactcaacttcaagctctttaacattcaagtcaaagaggtcacgcagaatgacggtacgacgacgattgccaataaccttaccagcacggttcaggtgtttactgactcggagtaccagctcccgtacgtcctcggctcggcgcatcaaggatgcctcccgccgttcccagcagacgtcttcatggtcccacagtatggatacctcaccctgaacaacgggagtcaggcggtaggacgctcttccttttactgcctggagtactttccttctcagatgcttcgtaccggaaacaactttaccttcagctacacctttgaagacgtgcctttccacagtagctacgctcacagccagagtctggatcggctgatgaatcctcttatcgaccagtacctgtattatctaaacaaaacacaatcaaatagtggaactcttcagcagtctcggctactgtttagtcaagctggacccaccagcatgtctcttcaagctaaaaactggctgcctggaccttgctacagacaacagcgtctgtcaaagcaggcaaacgacaacaacaacagcaactttccctggactgcggctacaaagtatcatctaaatggccgggactcgttggttaatccaggaccagctatggccagccacaaagacgatgaagaaaagtttttccccatgcatggaaccctgatatttggtaaacaaggaacaaatgctaacgacgcggatttggacaatgtcatgattacagatgaagaagaaatccgcaccaccaatcccgtggctacggagcagtacgggactgtgtcaaataatttgcaaaactcaaatactggtccaactactggaactgtcaatcaccaaggagcgttacctggtatggtgtggcaggatcgagacgtgtacctgcagggacccatttgggccaagattcctcacaccgatggacactttcatccttctccactgatgggaggttttggactcaaacacccgcctcctcagatcatgatcaaaaacactcccgttccagccaatcctcctacaaacttcagttctgccaagtttgcttccttcatcacacagtattccacgggacaagtcagcgtggagattgagtgggagctgcagaaggagaacagcaaacgctggaaccccgagatccagtacacttccaactacaacaaatctgttaatgtggactttactgtggacactaatggcgtgtattcagagcctcgccccattggcaccagatacctgactcgtaatctgtaa

SEQ ID NO: 4366 - DNA, 2208 bp, synthetic construct
  misc_feature 1..2208: note = source = /note="Description of Artificial Sequence: Synthetic polynucleotide"
  source 1..2208: mol_type = other DNA
atggctgccgatggttatcttccagattggctcgaggacactctctctgaaggaataagacagtggtggaagctcaaacctggcccaccaccgccaaagcccgcagagcggcacaaggacgacagtaggggtcttgtgcttcctgggtacaagtacctcggacccttcaacggactcgacaaaggagagccggtcaacgaggcagacgccgcggccctcgagcacgacaaggcctacgaccggcagctcgacagcggagacaacccgtacctcaagtacaaccacgccgacgcggagtttcaggagcgtcttaaagaagatacgtcttttgggggcaacctcggacgagcagtattccaggcgaaaaagagggttcttgaacctctgggcctggttgaggagcctgttaagacggctccgggaaaaaagaggccggtagagcactctcctgtggagccagactcctcctcgggaaccggaaaagcgggccagcagcctgcaagaaaaagattgaattttggtcagactggagacgcagactccgtacctgacccccagcctctcggacagccaccagcagcccccacaagtttgggatctactacaatggctacaggcagtggcgcaccaatggcagacaataacgagggtgccgatggagtgggtaattcctcaggaaattggcattgcgattcccaatggctgggcgacagagtcatcaccaccagcacccgaacctgggccctgcccacctacaacaaccacctctacaagcaaatctccagccaatcaggagcatcgaacgacaaccactactttggccacagcaccccttgggggtattttgacttcaacagattccactgtcacttctccccacgtgactggcaaagactcatcaacaacaactggggattccgacccaagagactcaacttcaagctctttaacattcaagtcaaagaggtcacgcagaatgacggtacgacgacgattgccaataaccttaccagcacggttcaggtgtttactgactcggagtaccagctcccgtacgtcctcggctcggcgcatcaaggatgcctcccgccgttcccagcagacgtcttcatggtcccacagtatggatacctcaccctgaacaacgggagtcaggcggtaggacgctcttccttttactgcctggagtactttccttctcagatgcttcgtaccggaaacaactttaccttcagctacacctttgaagacgtgcctttccacagtagctacgctcacagccagagtctggatcggctgatgaatcctcttatcgaccagtacctgtattatctaaacaaaacacaatcaaatagtggaactcttcagcagtctcggctactgtttagtcaagctggacccaccagcatgtctcttcaagctaaaaactggctgcctggaccttgctacagacaacagcgtctgtcaaagcaggcaaacgacaacaacaacagcaactttccctggactgcggctacaaagtatcatctaaatggccgggactcgttggttaatccaggaccagctatggccagccacaaagacgatgaagaaaagtttttccccatgcatggaaccctgatatttggtaaacaaggaacaaatgctaacgacgcggatttggacaatgtcatgattacagatgaagaagaaatccgcaccaccaatcccgtggctacggagcagtacgggactgtgtcaaataatttgcaaaactcaaatactggtccaactactggaactgtcaatcaccaaggagcgttacctggtatggtgtggcaggatcgagacgtgtacctgcagggacccatttgggccaagattcctcacaccgatggacgctttcatccttctccactgatgggaggttttggactcaaacacccgcctcctcagatcatgatcaaaaacactcccgttccagccaatcctcctacaaacttcagttctgccaagtttgcttccttcatcacacagtattccacgggacaagtcagcgtggagattgagtgggagctgcagaaggagaacagcaaacgctggaaccccgagatccagtacacttccaactacaacaaatctgttaatgtggactttactgtggacactaatggcgtgtattcagagcctcgccccattggcaccagatacctgactcgtaatctgtaa

SEQ ID NO: 4367 - DNA, 2208 bp, synthetic construct
  misc_feature 1..2208: note = source = /note="Description of Artificial Sequence: Synthetic polynucleotide"
  source 1..2208: mol_type = other DNA
atggctgccgatggttatcttccagattggctcgaggacactctctctgaaggaataagacagtggtggaagctcaaacctggcccaccaccgccaaagcccgcagagcggcacaaggacgacagtaggggtcttgtgcttcctgggtacaagtacctcggacccttcaacggactcgacaaaggagagccggtcaacgaggcagacgccgcggccctcgagcacgacaaggcctacgaccggcagctcgacagcggagacaacccgtacctcaagtacaaccacgccgacgcggagtttcaggagcgtcttaaagaagatacgtcttttgggggcaacctcggacgagcagtattccaggcgaaaaagagggttcttgaacctctgggcctggttgaggagcctgttaagacggctccgggaaaaaagaggccggtagagcactctcctgtggagccagactcctcctcgggaaccggaaaagcgggccagcagcctgcaagaaaaagattgaattttggtcagactggagacgcagactccgtacctgacccccagcctctcggacagccaccagcagcccccacaagtttgggatctactacaatggctacaggcagtggcgcaccaatggcagacaataacgagggtgccgatggagtgggtaattcctcaggaaattggcattgcgattcccaatggctgggcgacagagtcatcaccaccagcacccgaacctgggccctgcccacctacagcaaccacctctacaagcaaatctccagccaatcaggagcatcgaacgacaaccactactttggccacagcaccccttgggggtattttgacttcaacagattccactgtcacttctccccacgtgactggcaaagactcatcaacaacaactggggattccgacccaagagactcaacttcaagctctttaacattcaagtcaaagaggtcacgcagaatgacggtacgacgacgattgccaataaccttaccagcacggttcaggtgtttactgactcggagtaccagctcccgtacgtcctcggctcggcgcatcaaggatgcctcccgccgctcccagcagacgtcttcatggtcccacagtatggatacctcaccctgaacaacgggagtcaggcggtaggacgctcttccttttactgcctggagtactttccttctcagatgcttcgtaccggaaacaactttaccttcagctacacctttgaagacgtgcctttccacagtagctacgctcacagccagagtctggatcggctgatgaatcctcttatcgaccagtacctgtattatctaaacaaaacacaatcaaatagtggaactcttcagcagtctcggctactgtttagtcaagctggacccaccagcatgtctcttcaagctaaaaactggctgcctggaccttgctacagacaacagcgtctgtcaaagcaggcaaacgacaacaacaacagcaactttccctggactgcggctacaaagtatcatctaaatggccgggactcgttggttaatccaggaccagctatggccagccacaaagacgatgaagaaaagtttttccccatgcatggaaccctgatatttggtaaacaaggaacaaatgctaacgacgcggatttggacaatgtcatgattacagatgaagaagaaatccgcaccaccaatcccgtggctacggagcagtacgggactgtgtcaaataatttgcaaaactcaaatactggtccaactactggaactgtcaatcaccaaggagcgttacctggtatggtgtggcaggatcgagacgtgtacctgcagggacccatttgggccaagattcctcacaccgatggacactttcatccttctccactgatgggaggttttggactcaaacacccgcctcctcagatcatgatcaaaaacactcccgttccagccaatcctcctacaaacttcagttctgccaagtttgcttccttcatcacacagtattccacgggacaagtcagcgtggagattgagtgggagctgcagaaggagaacagcaaacgctggaaccccgagatccagtacacttccaactacaacaaatctgttaatgtggactttactgtggacactaatggcgtgtattcagagcctcgccccattggcaccagatacctgactcgtaatctgtaa

SEQ ID NO: 4368 - DNA, 2208 bp, synthetic construct
  misc_feature 1..2208: note = source = /note="Description of Artificial Sequence: Synthetic polynucleotide"
  source 1..2208: mol_type = other DNA
atggctgccgatggttatcttccagattggctcgaggacactctctctgaaggaataagacagtggtggaagctcaaacctggcccaccaccgccaaagcccgcagagcggcacaaggacgacagtaggggtcttgtgcttcctgggtacaagtacctcggacccttcaacggactcgacaaaggagagccggtcaacgaggcagacgccgcggccctcgagcacgacaaggcctacgaccggcagctcgacagcggagacaacccgtacctcaagtacaaccacgccgacgcggagtttcaggagcgtcttaaagaagatacgtcttttgggggcaacctcggacgagcagtattccaggcgaaaaagagggttcttgaacctctgggcctggttgaggagcctgttaagacggctccgggaaaaaagaggccggtagagcactctcctgtggagccagactcctcctcgggaaccggaaaagcgggccagcagcctgcaagaaaaagattgaattttggtcagactggaggcgcagactccgtacctgacccccagcctctcggacagccaccagcagcccccacaagtttgggatctactacaatggctacaggcagtggcgcaccaatggcagacaataacgagggtgccgatggagtgggtaattcctcaggaaattggcattgcgattcccaatggctgggcgacagagtcatcaccaccagcacccgaacctgggccctgcccacctacaacaaccacctctacaagcaaatctccagccaatcaggagcatcgaacgacaaccactactttggccacagcaccccttgggggtattttgacttcaacagattccactgtcacttctccccacgtgactggcaaagactcatcaacaacaactggggattccgacccaagagactcaacttcaagctctttaacattcaagtcaaagaggtcacgcagaatgacggtacgacgacgattgccaataaccttaccagcacggttcaggtgtttactgactcggagtaccagctcccgtacgtcctcggctcggcgcatcaaggatgcctcccgccgttcccagcagacgtcttcatggtcccacagtatggatacctcaccctgaacaacgggagtcaggcggtaggacgctcttccttttactgcctggagtactttccttctcagatgcttcgtaccggaaacaactttaccttcagctacacctttgaagacgtgcctttccacagtagctacgctcacagccagagtctggatcggctgatgaatcctcttatcgaccagtacctgtattatctaaacaaaacacaatcaaatagtggaactcttcagcagtctcggctactgtttagtcaagctggacccaccagcatgtctcttcaagctaaaaactggctgcctggaccttgctacagacaacagcgtctgtcaaagcaggcaaacgacaacaacaacagcaactttccctggactgcggctacaaagtatcatctaaatggccgggactcgttggttaatccaggaccagctatggccagccacaaagacgatgaagaaaagtttttccccatgcatggaaccctgatatttggtaaacaaggaacaaatgctaacgacgcggatttggacaatgtcatgattacagatgaagaagaaatccgcaccaccaatcccgtggctacggagcagtacgggactgtgtcaaataatttgcaaaactcaaatactggtccaactactggaactgtcaatcaccaaggagcgttacctggtatggtgtggcaggatcgagacgtgtacctgcagggacccatttgggccaagattcctcacaccgatggacactttcatccttctccactgatgggaggttttggactcaaacacccgcctcctcagatcatgatcaaaaacactcccgttccagccaatcctcctacaaacttcagttctgccaagtttgcttccttcatcacacagtattccacgggacaagtcagcgtggagattgagtgggagctgcagaaggagaacagcaaacgctggaaccccgagatccagtacacttccaactacaacaaatctgttaatgtggactttactgtggacactaatggcgtgtattcagagcctcgccccattggcaccagatacctgactcgtaatctgtaa

SEQ ID NO: 4369 - DNA, 2208 bp, synthetic construct
  misc_feature 1..2208: note = source = /note="Description of Artificial Sequence: Synthetic polynucleotide"
  source 1..2208: mol_type = other DNA
atggctgccgatggttatcttccagattggctcgaggacactctctctgaaggaataagacagtggtggaagctcaaacctggcccaccaccgccaaagcccgcagagcggcacaaggacgacagtaggggtcttgtgcttcctgggtacaagtacctcggacccttcaacggactcgacaaaggagagccggtcaacgaggcagacgccgcggccctcgagcacggcaaggcctacgaccggcagctcgacagcggagacaacccgtacctcaagtacaaccacgccgacgcggagtttcaggagcgtcttaaagaagatacgtcttttgggggcaacctcggacgagcagtattccaggcgaaaaagagggttcttgaacctctgggcctggttgaggagcctgttaagacggctccgggaaaaaagaggccggtagagcactctcctgtggagccagactcctcctcgggaaccggaaaagcgggccagcagcctgcaagaaaaagattgaattttggtcagactggagacgcagactccgtacctgacccccagcctctcggacagccaccagcagcccccacaagtttgggatctactacaatggctacaggcagtggcgcaccaatggcagacaataacgagggtgccgatggagtgggtaattcctcaggaaattggcattgcgattcccaatggctgggcgacagagtcatcaccaccagcacccgaacctgggccctgcccacctacaacaaccacctctacaagcaaatctccagccaatcaggagcatcgaacgacaaccactactttggccacagcaccccttgggggtattttgacttcaacagattccactgtcacttctccccacgtgactggcaaagactcatcaacaacaactggggattccgacccaagagactcaacttcaagctctttaacattcaagtcaaagaggtcacgcagaatgacggtacgacgacgattgccaataaccttaccagcacggttcaggtgtttactgactcggagtaccagctcccgtacgtcctcggctcggcgcatcaaggatgcctcccgccgttcccagcagacgtcttcatggtcccacagtatggatacctcaccctgaacaacgggagtcaggcggtaggacgctcttccttttactgcctggagtactttccttctcagatgcttcgtaccggaaacaactttaccttcagctacacctttgaagacgtgcctttccacagtagctacgctcacagccagagtctggatcggctgatgaatcctcttatcgaccagtacctgtattatctaaacaaaacacaatcaaatagtggaactcttcagcagtctcggctactgtttagtcaagctggacccaccagcatgtctcttcaagctaaaaactggctgcctggaccttgctacagacaacagcgtctgtcaaagcaggcaaacgacaacaacaacagcaactttccctggactgcggctacaaagtatcatctaaatggccgggactcgttggttaatccaggaccagctatggccagccacaaagacgatgaagaaaagtttttccccatgcatggaaccctgatatttggtaaacaaggaacaaatgctaacgacgcggatttggacaatgtcatgattacagatgaagaagaaatccgcaccaccaatcccgtggctacggagcagtacgggactgtgtcaaataatttgcaaaactcaaatactggtccaactactggaactgtcaatcaccaaggagcgttacctggtatggtgtggcaggatcgagacgtgtacctgcagggacccatttgggccaagattcctcacaccgatggacactttcatccttctccactgatgggaggttttggactcaaacacccgcctcctcagatcatgatcaaaaacactcccgttccagccaatcctcctacaaacttcagttctgccaagtttgcttccttcatcacacagtattccacgggacaagtcagcgtggagattgagtgggagctgcagaaggagaacagcaaacgctggaaccccgagatccagtacacttccaactacaacaaatctgttaatgtggactttactgtggacactaatggcgtgtattcagagcctcgccccattggcaccagatacctgactcgtaatctgtaa

SEQ ID NO: 4370 - DNA, 2208 bp, synthetic construct
  misc_feature 1..2208: note = source = /note="Description of Artificial Sequence: Synthetic polynucleotide"
  source 1..2208: mol_type = other DNA
atggctgccgatggttatcttccagattggctcgaggacactctctctgaaggaataagacagtggtggaagctcaaacctggcccaccaccgccaaagcccgcagagcggcacaaggacgacagtaggggtcttgtgcttcctgggtacaagtacctcggacccttcaacggactcgacaaaggagagccggtcaacgaggcagacgccgcggccctcgagcacgacaaggcctacgaccggcagctcgacagcggagacaacccgtacctcaagtacaaccacgccgacgcggagtttcaggagcgtcttaaagaagatacgtcttttgggggcaacctcggacgagcagtattccaggcgaaaaagagggttcttgaacctctgggcctggttgaggagcctgttaagacggctccgggaaaaaagaggccggtagagcactctcctgtggagccagactcctcctcgggaaccggaaaagcgggccagcagcctgcaagaaaaagattgaattttggtcagactggagacgcagactccgtacctgacccccagcctctcggacagccaccagcagcccccacaagtttgggatctactacaatggctacaggcagtggcgcaccaatggcagacaataacgagggtgccgatggagtgggtaattcctcaggaaattggcattgcgattcccaatggctgggcgacagagtcatcaccaccagcacccgaacctgggccctgcccacctacaacaaccacctctacaagcaaatctccagccaatcaggagcatcgaacgacaaccactactttggccacagcaccccttgggggtattttgacttcaacagattccactgtcacttctccccacgtgaccggcaaagactcatcaacaacaactggggattccgacccaagagactcaacttcaagctctttaacattcaagtcaaagaggtcacgcagaatgacggtacgacgacgattgccaataaccttaccagcacggttcaggtgtttactgactcggagtaccagctcccgtacgtcctcggctcggcgcatcaaggatgcctcccgccgttcccagcagacgtcttcatggtcccacagtatggatacctcaccctgaacaacgggagtcaggcggtaggacgctcttccttttactgcctggagtactttccttctcagatgcttcgtaccggaaacaactttaccttcagctacacctttgaagacgtgcctttccacagtagctacgctcacagccagagtctggatcggctgatgaatcctcttatcgaccagtacctgtattatctaaacaaaacacaatcaaatagtggaactcttcagcagtctcggctactgtttagtcaagctggacccaccagcatgtctcttcaagctaaaaactggctgcctggaccttgctacagacaacagcgtctgtcaaagcaggcaaacgacaacaacaacagcaactttccctggactgcggctacaaagtatcatctaaatggccgggactcgttggttaatccaggaccagctatggccagccacaaagacgatgaagaaaagtttttccccatgcatggaaccctgatatttggtaaacaaggaacaaatgctaacgacgcggatttggacaatgtcatgattacagatgaagaagaaatccgcaccaccaatcccgtggctacggagcagtacgggactgtgtcaaataatttgcaaaactcaaatactggtccaactactggaactgtcaatcaccaaggagcgttacctggtatggtgtggcaggatcgagacgtgtacctgcagggacccatttgggccaagattcctcacaccgatggacactttcatccttctccactgatgggaggttttggactcaaacacccgcctcctcagatcatgatcaaaaacactcccgttccagccaatcctcctacaaacttcagttctgccaagtttgcttccttcatcacacagtattccacgggacaagtcagcgtggagattgagtgggagctgcagaaggagaacagcaaacgctggaaccccgagatccagtacacttccaactacaacaaatctgttaatgtggactttactgtggacactaatggcgtgtattcagagcctcgccccattggcaccagatacctgactcgtaatctgtaa

SEQ ID NO: 4371 - DNA, 2208 bp, synthetic construct
  misc_feature 1..2208: note = source = /note="Description of Artificial Sequence: Synthetic polynucleotide"
  source 1..2208: mol_type = other DNA
atggctgccgatggttatcttccagattggctcgaggacactctctctgaaggaataagacagtggtggaagctcaaacctggcccaccaccgccaaagcccgcagagcggcacaaggacgacagtaggggtcttgtgcttcctgggtacaagtacctcggacccttcaacggactcgacaaaggagagccggtcaacgaggcagacgccgcggccctcgagcacgacaaggcctacgaccggcagctcgacagcggagacaacccgtacctcaagtacaaccacgccgacgcggagtttcaggagcgtcttaaagaagatacgtcttttgggggcaacctcggacgagcagtattccaggcgaaaaagagggttcttgaacctctgggcctggttgaggagcctgttaagacggctccgggaaaaaagaggccggtagagcactctcctgtggagccagactcctcctcgggaaccggaaaagcgggccagcagcctgcaagaaaaagattgaattttggtcagactggagacgcagactccgtacctgacccccagcctctcggacagccaccagcagcccccacaagtttgggatctactacaatggctacaggcagtggcgcaccaatggcagacaataacgagggtgccgatggagtgggtaattcctcaggaaattggcattgcgattcccaatggctgggcgacagagtcatcaccaccagcacccgaacctgggccctgcccacctacaacaaccacctctacaagcaaatctccagccaatcaggagcatcgaacgacaaccactactttggccacagcaccccttgggggtattttgacttcaacagattccactgtcacttctccccacgtgactggcaaagactcatcaacaacaactggggattccgacccaagagacccaacttcaagctctttaacattcaagtcaaagaggtcacgcagaatgacggtacgacgacgattgccaataaccttaccagcacggttcaggtgtttactgactcggagtaccagctcccgtacgtcctcggctcggcgcatcaaggatgcctcccgccgttcccagcagacgtcttcatggtcccacagtatggatacctcaccctgaacaacgggagtcaggcggtaggacgctcttccttttactgcctggagtactttccttctcagatgcttcgtaccggaaacaactttaccttcagctacacctttgaagacgtgcctttccacagtagctacgctcacagccagagtctggatcggctgatgaatcctcttatcgaccagtacctgtattatctaaacaaaacacaatcaaatagtggaactcttcagcagtctcggctactgtttagtcaagctggacccaccagcatgtctcttcaagctaaaaactggctgcctggaccttgctacagacaacagcgtctgtcaaagcaggcaaacgacaacaacaacagcaactttccctggactgcggctacaaagtatcatctaaatggccgggactcgttggttaatccaggaccagctatggccagccacaaagacgatgaagaaaagtttttccccatgcatggaaccctgatatttggtaaacaaggaacaaatgctaacgacgcggatttggacaatgtcatgattacagatgaagaagaaatccgcaccaccaatcccgtggctacggagcagtacgggactgtgtcaaataatttgcaaaactcaaatactggtccaactactggaactgtcaatcaccaaggagcgttacctggtatggtgtggcaggatcgagacgtgtacctgcagggacccatttgggccaagattcctcacaccgatggacactttcatccttctccactgatgggaggttttggactcaaacacccgcctcctcagatcatgatcaaaaacactcccgttccagccaatcctcctacaaacttcagttctgccaagtttgcttccttcatcacacagtattccacgggacaagtcagcgtggagattgagtgggagctgcagaaggagaacagcaaacgctggaaccccgagatccagtacacttccaactacaacaaatctgttaatgtggactttactgtggacactaatggcgtgtattcagagcctcgccccattggcaccagatacctgactcgtaatctgtaa

SEQ ID NO: 4372 - DNA, 2208 bp, synthetic construct
  misc_feature 1..2208: note = source = /note="Description of Artificial Sequence: Synthetic polynucleotide"
  source 1..2208: mol_type = other DNA
atggctgccgatggttatcttccagattggctcgaggacactctctctgaaggaataagacagtggtggaagctcaaacctggcccaccaccgccaaagcccgcagagcggcacaaggacgacagtaggggtcttgtgcttcctgggtacaagtacctcggacccttcaacggactcgacaaaggagagccggtcaacgaggcagacgccgcggccctcgagcacgacaaggcctacgaccggcagctcgacagcggagacaacccgtacctcaagtacaaccacgccgacgcggagtttcaggagcgtcttaaagaagatacgtcttttgggggcaacctcggacgagcagtattccaggcgaaaaagagggttcttgaacctctgggcctggttgaggagcctgttaagacggctccgggaaaaaagaggccggtagagcactctcctgtggagccagactcctcctcgggaaccggaaaagcgggccagcagcctgcaagaaaaagattgaattttggtcagactggagacgcagactccgtacctgacccccagcctctcggacagccaccagcagcccccacaagtttgggatctactacaatggctacaggcagtggcgcaccaatggcagacaataacgagggtgccgatggagtgggtaattcctcaggaaattggcattgcgattcccaatggctgggcgacagagtcatcaccaccagcacccgaacctgggccctgcccacctacaacaaccacctctacaagcaaatctccagccaatcaggagcatcgaacgacaaccactactttggccacagcaccccttgggggtattttgacttcaacagattccactgtcacttctccccacgtgactggcaaagactcatcaacaacaactggggattccgacccaagagactcaacttcaagctctttaacattcaagtcaaagaggtcacgcagaatgacggtacgacgacgattgccaataaccttaccagcacggttcaggtgtttactgactcggagtaccagctcccgtacgtcctcggctcggcgcatcaaggatgcctcccgccgttcccagcagacgtcttcatggtcccacagtatggatacctcaccctgaacaacgggagtcaggcggtaggacgctcttccttttactgcctggagtactttccttctcagatgcttcgtaccggaaacaactttaccttcagctacacctttgaagacgtgcctttccacagtagctacgctcacagccagagtctggatcggctgatgaatcctcttatcgaccagtacctgtattatctaaacaaaacacaatcaaatagtggaactcttcagcagtctcggctactgtttagtcaagctggacccaccagcatgtctcttcaagctaaaaactggctgcctggaccttgctacagacaacagcgtctgtcaaagcaggcaaacgacaacaacaacagcaactttccctggactgcggctacaaagtatcatctaaatggccgggactcgttggttaatccaggaccagctatggccagccacaaagacgatgaagaaaagtttttccccatgcatggaaccctgatatttggtaaacaaggaacaaatgctaacgacgcggatttggacaatgtcatgattacagatgaagaagaaatccgcaccaccaatcccgtggctacggagcagtacgggactgtgtcaaataatttgcaaaactcaaatactggtccaactactggaactgtcaatcaccaaggagcgttacctggtatggtgtggcaggatcgagacgtgtacctgcagggacccatttgggccaagattcctcacaccgatggacactttcatccttctccactgatgggaggttttggactcaaacacccgcctcctcagatcatgatcaaaaacactcccgttccagccaatcctcctacaaacttcagttctgccaagtttgcttccttcatcacacagtattccacgggacaagtcagcgtggagattgagtgggagctgcagaaggagaacagcaaacgctggaaccccgagatccagtacacttccaactacaacaaatctgttaatgtggactttactgtgggcactaatggcgtgtattcagagcctcgccccattggcaccagatacctgactcgtaatctgtaa

SEQ ID NO: 4373 - DNA, 2208 bp, synthetic construct
  misc_feature 1..2208: note = source = /note="Description of Artificial Sequence: Synthetic polynucleotide"
  source 1..2208: mol_type = other DNA
atggctgccgatggttatcttccagattggctcgaggacactctctctgaaggaataagacagtggtggaagctcaaacctggcccaccaccgccaaagcccgcagagcggcacaaggacgacagtaggggtcttgtgcttcctgggtacaagtacctcggacccttcaacggactcgacaaaggagagccggtcaacgaggcagacgccgcggccctcgagcacgacaaggcctacgaccggcagctcgacagcggagacaacccgtacctcaagtacaaccacgccgacgcggagtttcaggagcgtcttaaagaagatacgtcttttgggggcaacctcggacgagcagtattccaggcgaaaaagagggttcttgaacctctgggcctggttgaggagcctgttaagacggctccgggaaaaaagaggccggtagagcactctcctgtggagccagactcctcctcgggaaccggaaaagcgggccagcagcctgcaagaaaaagattgaattttggtcagactggagacgcagactccgtacctgacccccagcctctcggacagccaccagcagcccccacaagtttgggatctactacaatggctacaggcagtggcgcaccaatggcagacaataacgagggtgccgatggagtgggtaattcctcaggaaattggcattgcgattcccaatggctgggcgacagagtcatcaccaccagcacccgaacctgggccctgcccacctacaacaaccacctctacaagcaaatctccagccaatcaggagcatcgaacgacaaccactactttggccacagcaccccttgggggtattttgacttcaacagattccactgtcacttctccccacgtgactggcaaagactcatcaacaacaactggggattccgacccaagagactcaacttcaagctctttaacattcaagtcaaagaggtcacgcagaatgacggtacgacgacgattgccaataaccttaccagcacggttcaggtgtttactgactcggagtaccagctcccgtacgtcctcggctcggcgcatcaaggatgcctcccgccgttcccagcagacgtcttcatggtcccacagtatggatacctcaccctgaacaacgggagtcaggcggtaggacgctcttccttttactgcctggagtactttccttctcagatgcttcgtaccggaaacaactttaccttcagctacacctttgaagacgtgcctttccacagtagctacgctcacagccagagtctggatcggctgatgaatcctcttatcgaccagtacctgtattatctaaacaaaacacaatcaaatagtggaactcttcagcagtctcggctactgtttagtcaagctggacccaccagcacgtctcttcaagctaaaaactggctgcctggaccttgctacagacaacagcgtctgtcaaagcaggcaaacgacaacaacaacagcaactttccctggactgcggctacaaagtatcatctaaatggccgggactcgttggttaatccaggaccagctatggccagccacaaagacgatgaagaaaagtttttccccatgcatggaaccctgatatttggtaaacaaggaacaaatgctaacgacgcggatttggacaatgtcatgattacagatgaagaagaaatccgcaccaccaatcccgtggctacggagcagtacgggactgtgtcaaataatttgcaaaactcaaatactggtccaactactggaactgtcaatcaccaaggagcgttacctggtatggtgtggcaggatcgagacgtgtacctgcagggacccatttgggccaagattcctcacaccgatggacactttcatccttctccactgatgggaggttttggactcaaacacccgcctcctcagatcatgatcaaaaacactcccgttccagccaatcctcctacaaacttcagttctgccaagtttgcttccttcatcacacagtattccacgggacaagtcagcgtggagattgagtgggagctgcagaaggagaacagcaaacgctggaaccccgagatccagtacacttccaactacaacaaatctgttaatgtggactttactgtggacactaatggcgtgtattcagagcctcgccccattggcaccagatacctgactcgtaatctgtaa

SEQ ID NO: 4374 - DNA, 2208 bp, synthetic construct
  misc_feature 1..2208: note = source = /note="Description of Artificial Sequence: Synthetic polynucleotide"
  source 1..2208: mol_type = other DNA
atggctgccgatggttatcttccagattggctcgaggacactctctctgaaggaataagacagtggtggaagctcaaacctggcccaccaccgccaaagcccgcagagcggcacaaggacgacagtaggggtcttgtgcttcctgggtacaagtacctcggacccttcaacggactcgacaaaggagagccggtcaacgaggcagacgccgcggccctcgagcacgacaaggcctacgaccggcagctcgacagcggagacaacccgtacctcaagtacaaccacgccgacgcggagtttcaggagcgtcttaaagaagatacgtcttttgggggcaacctcggacgagcagtattccaggcgaaaaagagggttcttgaacctctgggcctggttgaggagcctgttaagacggctccgggaaaaaagaggccggtagagcactctcctgtggagccagactcctcctcgggaaccggaaaagcgggccagcagcctgcaagaaaaagattgaattttggtcagactggagacgcagactccgtacctgacccccagcctctcggacagccaccagcagcccccacaagtttgggatctactacaatggctacaggcagtggcgcaccaatggcagacaataacgagggtgccgatggagtgggtaattcctcaggaaattggcattgcgattcccaatggctgggcgacagagtcatcaccaccagcacccgaacctgggccctgcccacctacaacaaccacctctacaagcaaatctccagccaatcaggagcatcgaacgacaaccactactttggccacagcaccccttgggggtattttgacttcaacagattccactgtcacttctccccacgtgactggcaaagactcatcaacaacaactggggattccgacccaagagactcaacttcaagctctttaacattcaagtcaaagaggtcacgcagaatgacggtacgacgacgattgccaataaccttaccagcacggttcaggtgtttactgactcggagtaccagctcccgtacgtcctcggctcggcgcatcaaggatgcctcccgccgttcccagcagacgtcttcatggtcccacagtatggatacctcaccctgaacaacgggagtcaggcggtaggacgctcttccttttactgcctggagtactttccttctcagatgcttcgtaccggaaacaactttaccttcagctacacctttgaagacgtgcctttccacagtagctacgctcacagccagagtctggatcggctgatgaatcctcttatcgaccagtacctgtattatctaaacaaaacacaatcaaatagtggaactcttcagcagtctcggctactgtttagtcaagctggacccaccagcatgtctcttcaagctaaaaactggctgcctggaccttgctacagacaacagcgtctgtcaaagcaggcaaacgacaacaacaacagcaactttccctggactgcggctacaaagtatcatctaaatggccgggactcgttggttaatccaggaccagctatggccagccacaaagacgatgaagaaaagtttttccccatgcatggaaccctgatatttggtaaacaaggaacaaatgctaacgacgcggatttggacaatgtcatgattacagatgaagaagaaatccgcaccaccaatcccgtggctacggagcagtacgggactgtgtcaaataatttgcaaaactcaaatactggtccaactactggaactatcaatcaccaaggagcgttacctggtatggtgtggcaggatcgagacgtgtacctgcagggacccatttgggccaagattcctcacaccgatggacactttcatccttctccactgatgggaggttttggactcaaacacccgcctcctcagatcatgatcaaaaacactcccgttccagccaatcctcctacaaacttcagttctgccaagtttgcttccttcatcacacagtattccacgggacaagtcagcgtggagattgagtgggagctgcagaaggagaacagcaaacgctggaaccccgagatccagtacacttccaactacaacaaatctgttaatgtggactttactgtggacactaatggcgtgtattcagagcctcgccccattggcaccagatacctgactcgtaatctgtaa

SEQ ID NO: 4375 - DNA, 2208 bp, synthetic construct
  misc_feature 1..2208: note = source = /note="Description of Artificial Sequence: Synthetic polynucleotide"
  source 1..2208: mol_type = other DNA
atggctgccgatggttatcttccagattggctcgaggacactctctctgaaggaataagacagtggtggaagctcaaacctggcccaccaccgccaaagcccgcagagcggcacaaggacgacagtaggggtcttgtgcttcctgggtacaagtacctcggacccttcaacggactcgacaaaggagagccggtcaacgaggcagacgccgcggccctcgagcacgacaaggcctacgaccggcagctcgacagcggagacaacccgtacctcaagtacaaccacgccgacgcggagtttcaggagcgtcttaaagaagatacgtcttttgggggcaacctcggacgagcagtattccaggcgaaaaagagggttcttgaacctctgggcctggttgaggagcctgttaagacggctccgggaaaaaagaggccggtagagcactctcctgtggagccagactcctcctcgggaaccggaaaagcgggccagcagcctgcaagaaaaagattgaattttggtcagactggagacgcagactccgtacctgacccccagcctctcggacagccaccagcagcccccacaagtttgggatctactacaatggctacaggcagtggcgcaccaatggcagacaataacgagggtgccgatggagtgggtaattcctcaggaaattggcattgcgattcccaatggctgggcgacagagtcatcaccaccagcacccgaacctgggccctgcccacctacaacaaccacctctacaagcaaatctccagccaatcaggagcatcgaacgacaaccactactttggccacagcaccccttgggggtattttgacttcaacagattccactgtcacttctccccacgtgactggcaaagactcatcaacaacaactggggattccgacccaagagactcaacttcaagctctttaacattcaagtcaaagaggtcacgcagaatgacggtacggcgacgattgccaataaccttaccagcacggttcaggtgtttactgactcggagtaccagctcccgtacgtcctcggctcggcgcatcaaggatgcctcccgccgttcccagcagacgtcttcatggtcccacagtatggatacctcaccctgaacaacgggagtcaggcggtaggacgctcttccttttactgcctggagtactttccttctcagatgcttcgtaccggaaacaactttaccttcagctacacctttgaagacgtgcctttccacagtagctacgctcacagccagagtctggatcggctgatgaatcctcttatcgaccagtacctgtattatctaaacaaaacacaatcaaatagtggaactcttcagcagtctcggctactgtttagtcaagctggacccaccagcatgtctcttcaagctaaaaactggctgcctggaccttgctacagacaacagcgtctgtcaaagcaggcaaacgacaacaacaacagcaactttccctggactgcggctacaaagtatcatctaaatggccgggactcgttggttaatccaggaccagctatggccagccacaaagacgatgaagaaaagtttttccccatgcatggaaccctgatatttggtaaacaaggaacaaatgctaacgacgcggatttggacaatgtcatgattacagatgaagaagaaatccgcaccaccaatcccgtggctacggagcagtacgggactgtgtcaaataatttgcaaaactcaaatactggtccaactactggaactgtcaatcaccaaggagcgttacctggtatggtgtggcaggatcgagacgtgtacctgcagggacccatttgggccaagattcctcacaccgatggacactttcatccttctccactgatgggaggttttggactcaaacacccgcctcctcagatcatgatcaaaaacactcccgttccagccaatcctcctacaaacttcagttctgccaagtttgcttccttcatcacacagtattccacgggacaagtcagcgtggagattgagtgggagctgcagaaggagaacagcaaacgctggaaccccgagatccagtacacttccaactacaacaaatctgttaatgtggactttactgtggacactaatggcgtgtattcagagcctcgccccattggcaccagatacctgactcgtaatctgtaa

SEQ ID NO: 4376 - DNA, 2208 bp, synthetic construct
  misc_feature 1..2208: note = source = /note="Description of Artificial Sequence: Synthetic polynucleotide"
  source 1..2208: mol_type = other DNA
atggctgccgatggttatcttccagattggctcgaggacactctctctgaaggaataagacagtggtggaagctcaaacctggcccaccaccgccaaagcccgcagagcggcacaaggacgacagtaggggtcttgtgcttcctgggtacaagtacctcggacccttcaacggactcgacaaaggagagccggtcaacgaggcagacgccgcggccctcgagcacgacaaggcctacgaccggcagctcgacagcggagacaacccgtacctcaagtacaaccacgccgacgcggagtttcaggagcgtcttaaagaagatacgtcttttgggggcaacctcggacgagcagtattccaggcgaaaaagagggttcttgaacctctgggcctggttgaggagcctgttaagacggctccgggaaaaaagaggccggtagagcactctcctgtggagccagactcctcctcgggaaccggaaaagcgggccagcagcctgcaagaaaaagattgaattttggtcagactggagacgcagactccgtacctgacccccagcctctcggacagccaccagcagcccccacaagtttgggatctactacaatggctacaggcagtggcgcaccaatggcagacaataacgagggtgccgatggagtgggtaattcctcaggaaattggcattgcgattcccaatggctgggcgacagagtcatcaccaccagcacccgaacctgggccctgcccacctacaacaaccacctctacaagcaaatctccagccaatcaggagcatcgaacgacaaccactactttggccacagcaccccttgggggtattttgacttcaacagattccactgtcacttctccccacgtgactggcaaagactcatcaacaacaactggggattccgacccaagagactcaacttcaagctctttaacattcaagtcaaagaggtcacgcagaatgacggtacgacgacgattgccaataaccttaccagcacggttcaggtgtttactgactcggagtaccagctcccgtacgtcctcggctcggcgcatcaaggatgcctcccgccgttcccagcagacgtcttcatggtcccacagtatggatacctcaccctgaacaacgggagtcaggcggtaggacgctcttccttttactgcctggagtactttccttctcagatgcttcgtaccggaaacaactttaccttcagctacacctttgaagacgtgcctttccacagtagctacgctcacagccagagtctggatcggctgatgaatcctcttatcgaccagtacctgtattatctaaacaaaacacaatcaaatagtggaactcttcagcagtctcggctactgtttagtcaagctggacccaccagcatgtctcttcaagctaaaaactggctgcctggaccttgctacagacaacagcgtctgtcaaagcaggcaaacgacaacaacaacagcaactttccctggactgtggctacaaagtatcatctaaatggccgggactcgttggttaatccaggaccagctatggccagccacaaagacgatgaagaaaagtttttccccatgcatggaaccctgatatttggtaaacaaggaacaaatgctaacgacgcggatttggacaatgtcatgattacagatgaagaagaaatccgcaccaccaatcccgtggctacggagcagtacgggactgtgtcaaataatttgcaaaactcaaatactggtccaactactggaactgtcaatcaccaaggagcgttacctggtatggtgtggcaggatcgagacgtgtacctgcagggacccatttgggccaagattcctcacaccgatggacactttcatccttctccactgatgggaggttttggactcaaacacccgcctcctcagatcatgatcaaaaacactcccgttccagccaatcctcctacaaacttcagttctgccaagtttgcttccttcatcacacagtattccacgggacaagtcagcgtggagattgagtgggagctgcagaaggagaacagcaaacgctggaaccccgagatccagtacacttccaactacaacaaatctgttaatgtggactttactgtggacactaatggcgtgtattcagagcctcgccccattggcaccagatacctgactcgtaatctgtaa

SEQ ID NO: 4377 - DNA, 2208 bp, synthetic construct
  misc_feature 1..2208: note = source = /note="Description of Artificial Sequence: Synthetic polynucleotide"
  source 1..2208: mol_type = other DNA
atggctgccgatggttatcttccagattggctcgaggacactctctctgaaggaataagacagtggtggaagctcaaacctggcccaccaccgccaaagcccgcagagcggcacaaggacgacagtaggggtcttgtgcttcctgggtacaagtacctcggacccttcaacggactcgacaaaggagagccggtcaacgaggcagacgccgcggccctcgagcacgacaaggcctacgaccggcagctcgacagcggagacaacccgtacctcaagtacaaccacgccgacgcggagtttcaggagcgtcttaaagaagatacgtcttttgggggcaacctcggacgagcagtattccaggcgaaaaagagggttcttgaacctctgggcctggttgaggagcctgttaagacggctccgggaaaaaagaggccggtagagcactctcctgtggagccagactcctcctcgggaaccggaaaagcgggccagcagcctgcaagaaaaagattgaattttggtcagactggagacgcagactccgtacctgacccccagcctctcggacagccaccagcagcccccacaagtttgggatctactacaatggctacaggcagtggcgcaccaatggcagacaataacgagggtgccgatggagtgggtaattcctcaggaaattggcattgcgattcccaatggctgggcgacagagtcatcaccaccagcacccgaacctgggccctgcccacctacaacaaccacctctacaagcaaatctccagccaatcaggagcatcgaacgacaaccactactttggccacagcaccccttgggggtattttgacttcaacagattccactgtcacttctccccacgtgactggcaaagactcatcaacaacaactggggattccgacccaagagactcaacttcaagctctttaacattcaagtcaaagaggtcacgcagaatgacggtacgacgacgattgccaataaccttaccagcacggttcaggtgtttactgactcggagtaccagctcccgtacgtcctcggctcggcgcatcaaggatgcctcccgccgttcccagcagacgtcttcatggtcccacagtatggatacctcaccctgaacaacgggagtcaggcggtaggacgctcttccttttactgcctggagtactttccttctcagatgcttcgtaccggaaacaactttaccttcagctacacctttgaagacgtgcctttccacagtagctacgctcacagccagagtctggatcggctgatgaatcctcttatcgaccagtacctgtattatctaaacaaaacacaatcaaatagtggaactcttcagcagtctcggctactgtttagtcaagctggacccaccagcatgtctcttcaagctaaaaactggctgcctggaccttgctacagacaacagcgtctgtcaaagcaggcaaacgacaacaacaacagcaactttccctggactgcggctacaaagtatcatctaaatggccgggactcgttggttaatccaggaccagctatggccagccacaaagacgatgaagaaaagtttttccccatgcatggaaccctgatatttggtaaacaaggaacaaatgctaacgacgcggatttggacaatgtcatgattacagatgaagaagaaatccgcaccaccaatcccgtggctacggagcagtacgggactgtgtcaaataatttgcaaaactcaaatactggtccaactactggaactgtcaatcaccaaggagcgttacctggtatggtgtggcaggatcgagacgtgtacctgcagggacccatttgggccaagattcctcacaccgatggacactttcatccttctccactgatgggaggttttggactcaaacacccgcctcctcagatcatgatcaaaaacactcccgttccagccaatcctcctacaaacttcagttctgccaagtttgcttccttcatcacacagcattccacgggacaagtcagcgtggagattgagtgggagctgcagaaggagaacagcaaacgctggaaccccgagatccagtacacttccaactacaacaaatctgttaatgtggactttactgtggacactaatggcgtgtattcagagcctcgccccattggcaccagatacctgactcgtaatctgtaa

SEQ ID NO: 4378 - DNA, 2208 bp, synthetic construct
  misc_feature 1..2208: note = source = /note="Description of Artificial Sequence: Synthetic polynucleotide"
  source 1..2208: mol_type = other DNA
atggctgccgatggttatcttccagattggctcgaggacactctctctgaaggaataagacagtggtggaagctcaaacctggcccaccaccgccaaagcccgcagagcggcacaaggacgacggtaggggtcttgtgcttcctgggtacaagtacctcggacccttcaacggactcgacaaaggagagccggtcaacgaggcagacgccgcggccctcgagcacgacaaggcctacgaccggcagctcgacagcggagacaacccgtacctcaagtacaaccacgccgacgcggagtttcaggagcgtcttaaagaagatacgtcttttgggggcaacctcggacgagcagtattccaggcgaaaaagagggttcttgaacctctgggcctggttgaggagcctgttaagacggctccgggaaaaaagaggccggtagagcactctcctgtggagccagactcctcctcgggaaccggaaaagcgggccagcagcctgcaagaaaaagattgaattttggtcagactggagacgcagactccgtacctgacccccagcctctcggacagccaccagcagcccccacaagtttgggatctactacaatggctacaggcagtggcgcaccaatggcagacaataacgagggtgccgatggagtgggtaattcctcaggaaattggcattgcgattcccaatggctgggcgacagagtcatcaccaccagcacccgaacctgggccctgcccacctacaacaaccacctctacaagcaaatctccagccaatcaggagcatcgaacgacaaccactactttggctacagcaccccttgggggtattttgacttcaacagattccactgtcacttctccccacgtgactggcaaagactcatcaacaacaactggggattccgacccaagagactcaacttcaagctctttaacattcaagtcaaagaggtcacgcagaatgacggtacgacgacgattgccaataaccttaccagcacggttcaggtgtttactgactcggagtaccagctcccgtacgtcctcggctcggcgcatcaaggatgcctcccgccgttcccagcagacgtcttcatggtcccacagtatggatacctcaccctgaacaacgggagtcaggcggtaggacgctcttccttttactgcctggagtactttccttctcagatgcttcgtaccggaaacaactttaccttcagctacacctttgaagacgtgcctttccacagtagctacgctcacagccagagtctggatcggctgatgaatcctcttatcgaccagtacctgtattatctaaacaaaacacaatcaaatagtggaactcttcagcagtctcggctactgtttagtcaagctggacccaccagcatgtctcttcaagctaaaaactggctgcctggaccttgctacagacaacagcgtctgtcaaagcaggcaaacgacaacaacaacagcaactttccctggactgcggctacaaagtatcatctaaatggccgggactcgttggttaatccaggaccagctatggccagccacaaagacgatgaagaaaagtttttccccatgcatggaaccctgatatttggtaaacaaggaacaaatgctaacgacgcggatttggacaatgtcatgattacagatgaagaagaaatccgcaccaccaatcccgtggctacggagcagtacgggactgtgtcaaataatttgcaaaactcaaatactggtccaactactggaactgtcaatcaccaaggagcgttacctggtatggtgtggcaggatcgagacgtgtacctgcagggacccatttgggccaagattcctcacaccgatggacactttcatccttctccactgatgggaggttttggactcaaacacccgcctcctcagatcatgatcaaaaacactcccgttccagccaatcctcctacaaacttcagttctgccaagtttgcttccttcatcacacagtattccacaggacaagtcagcgtggagattgagtgggagctgcagaaggagaacagcaaacgctggaaccccgagatccagtacacttccaactacaacaaatctgttaatgtggactttactgtggacactaatggcgtgtattcagagcctcgccccattggcaccagatacctgactcgtaatctgtaa

SEQ ID NO: 4379 - DNA, 2208 bp, synthetic construct
  misc_feature 1..2208: note = source = /note="Description of Artificial Sequence: Synthetic polynucleotide"
  source 1..2208: mol_type = other DNA
atggctgccgatggttatcttccagattggctcgaggacactctctctgaaggaataagacagtggtggaagctcaaacctggcccaccaccgccaaagcccgcagagcggcacaaggacgacagtaggggtcttgtgcttcctgggtacaagtacctcggacccttcaacggactcgacaaaggagagccggtcaacgaggcagacgccgcggccctcgagcacgacaaggcctacgaccggcagctcgacagcggagacaacccgtacctcaagtacaaccacgccgacgcggagcttcaggagcgtcttaaagaagatacgtcttttgggggcaacctcggacgagcagtattccaggcgaaaaagagggttcttgaacctctgggcctggttgaggagcctgttaagacggctccgggaaaaaagaggccggtagagcactctcctgtggagccagactcctcctcgggaaccggaaaagcgggccagcagcctgcaagaaaaagattgaattttggtcagactggagacgcagactccgtacctgacccccagcctctcggacagccaccagcagcccccacaagtttgggatctactacaatggctacaggcagtggcgcaccaatggcagacaataacgagggtgccgatggagtgggtaattcctcaggaaattggcattgcgattcccaatggctgggcgacagagtcatcaccaccagcacccgaacctgggccctgcccacctacaacaaccacctctacaagcaaatctccagccaatcaggagcatcgaacgacaaccactactttggctacagcaccccttgggggtattttgacttcaacagattccactgtcacttctccccacgtgactggcaaagactcatcaacaacaactggggattccgacccaagagactcaacttcaagctctttaacattcaagtcaaagaggtcacgcagaatgacggtacgacgacgattgccaataaccttaccagcacggttcaggtgtttactgactcggagtaccagctcccgtacgtcctcggctcggcgcatcaaggatgcctcccgccgttcccagcagacgtcttcatggtcccacagtatggatacctcaccctgaacaacgggagtcaggcggtaggacgctcttccttttactgcctggagtactttccttctcagatgcttcgtaccggaaacaactttaccttcagctacacctttgaagacgtgcctttccacagtagctacgctcacagccagagtctggatcggctgatgaatcctcttatcgaccagtacctgtattatctaaacaaaacacaatcaaatagtggaactcttcagcagtctcggctactgtttagtcaagctggacccaccagcatgtctcttcaagctaaaaactggctgcctggaccttgctacagacaacagcgtctgtcaaagcaggcaaacgacaacaacaacagcaactttccctggactgcggctacaaagtatcatctaaatggccgggactcgttggttaatccaggaccagctatggccagccacaaagacgatgaagaaaagtttttccccatgcatggaaccctgatatttggtaaacaaggaacaaatgctaacgacgcggatttggacaatgtcatgattacagatgaagaagaaatccgcaccaccaatcccgtggctacggagcagtacgggactgtgtcaaataatttgcaaaactcaaatactggtccaactactggaactgtcaatcaccaaggagcgttacctggtatggtgtggcaggatcgagacgtgtacctgcagggacccatttgggccaagattcctcacaccgatggacactttcatccttctccactgatgggaggttttggactcaaacacccgcctcctcagatcatgatcaaaaacactcccgttccagccaatcctcctacaaacttcagttctgccaagtttgcttccttcatcacacagtattccacaggacaagtcagcgtggagattgagtgggagctgcagaaggagaacagcaaacgctggaaccccgagatccagtacacttccaactacaacaaatctgttaatgtggactttactgtggacactaatggcgtgtattcagagcctcgccccattggcaccagatacctgactcgtaatctgtaa

SEQ ID NO: 4380 - DNA, 2208 bp, synthetic construct
  misc_feature 1..2208: note = source = /note="Description of Artificial Sequence: Synthetic polynucleotide"
  source 1..2208: mol_type = other DNA
atggctgccgatggttatcttccagattggctcgaggacactctctctgaaggaataagacagtggtggaagctcaaacctggcccaccaccgccaaagcccgcagagcggcacaaggacgacagtaggggtcttgtgcttcctgggtacaagtacctcggacccttcaacggactcgacaaaggagagccggtcaacgaggcagacgccgcggccctcgagcacgacaaggcctacgaccggcagctcgacagcggagacaacccgtacctcaagtacaaccacgccgacgcggagtttcaggagcgtcttaaagaagatacgtcttttgggggcaacctcggacgagcagtattccaggcgaaaaagagggttcttgaacctctgggcctggttgaggagcctgttaagacggctccgggaaaaaagaggccggtagagcactctcctgtggagccagactcctcctcgggaaccggaaaagcgggccagcagcctgcaagaaaaagattgaattttggtcagactggagacgcagactccgtacctgacccccagcctctcggacagccaccagcagcccccacaagtttgggatctactacaatggctacaggcagtggcgcaccaatggcagacaataacgagggtgccgatggagtgggtaattcctcaggaaattggcattgcgattcccaatggctgggcgacagagtcatcaccaccagcacccgaacctgggccctgcccacctacaacaaccacctctacaagcaaatctccagccaatcaggagcatcgaacgacaaccactactttggctacagcaccccttgggggtattttgacttcaacagattccactgtcacttctccccacgtgactggcaaagactcatcaacaacaactggggattccgacccaagagactcaacttcaagctctttaacattcaagtcaaagaggtcacgcagaatgacggtacgacgacgattgccaataaccttaccagcacggttcaggtgtttactgactcggagtaccagctcccgtacgtcctcggctcggcgcatcaaggatgcctcccgccgttcccagcagacgtcttcatggtcccacagtatggatacctcaccctgaacaacgggagtcaggcggtaggacgctcttccttttactgcctggagtactttccttctcagatgcttcgtaccggaaacaactttaccttcagctacacctttgaagacgtgcctttccacagtagctacgctcacagccagagtctggatcggctgatgaatcctcttatcgaccagtacctgtattatctaaacaaaacacaatcaaatagtggaactcttcagcagtctcggctactgtttagtcaagctggacccaccagcatgtctcttcaagctaaaaactggctgcctggaccttgctacagacaacagcgtctgtcaaagcaggcaaacgacaacaacaacagcaactttccctggactgcggctacaaagtatcatctaaatggccgggactcgttggttaatccaggaccagctatggccagccacaaagacgatgaagaaaagtttttccccatgcatggaaccctgatatttggtaaacaaggaacaaatgctaacgacgcggatttggacaatgtcatgattacagatgaagaagaaatccgcaccaccaatcccgtggctacggagcagtacgggactgtgtcaaataatttgcaaaactcaaatactggtccaactactggaactgtcaatcaccaaggagcgttacctggtatggtgtggcaggatcgagacgtgtacctgcagggacccatttgggccaagattcctcacaccgatggacactttcatccttctccactggtgggaggttttggactcaaacacccgcctcctcagatcatgatcaaaaacactcccgttccagccaatcctcctacaaacttcagttctgccaagtttgcttccttcatcacacagtattccacaggacaagtcagcgtggagattgagtgggagctgcagaaggagaacagcaaacgctggaaccccgagatccagtacacttccaactacaacaaatctgttaatgtggactttactgtggacactaatggcgtgtattcagagcctcgccccattggcaccagatacctgactcgtaatctgtaa

SEQ ID NO: 4381 - DNA, 2208 bp, synthetic construct
  misc_feature 1..2208: note = source = /note="Description of Artificial Sequence: Synthetic polynucleotide"
  source 1..2208: mol_type = other DNA
atggctgccgatggttatcttccagattggctcgaggacactctctctgaaggaataagacagtggtggaagctcaaacctggcccaccaccgccaaagcccgcagagcggcacaaggacgacagtaggggtcttgtgcttcctgggtacaagtacctcggacccttcaacggactcgacaaaggagagccggtcaacgaggcagacgccgcggccctcgagcacgacaaggcctacgaccggcagctcgacagcggagacaacccgtacctcaagtacaaccacgccgacgcggagtttcaggagcgtcttaaagaagatacgtcttttgggggcaacctcggacgagcagtattccaggcgaaaaagagggttcttgaacctctgggcctggttgaggagcctgttaagacggctccgggaaaaaagaggccggtagagcactctcctgtggagccagactcctcctcgggaaccggaaaagcgggccagcagcctgcaagaaaaagattgaattttggtcagactggagacgcagactccgtacctgacccccagcctctcggacagccaccagcagcccccacaagtttgggatctactacaatggctacaggcagtggcgcaccaatggcagacaataacgagggtgccgatggagtgggtaattcctcaggaaattggcattgcgattcccaatggctgggcgacagagtcatcaccaccagcacccgaacctgggccctgcccacctacaacaaccacctctacaagcaaatctccagccaatcaggagcatcgaacgacaaccactactttggctacagcaccccttgggggtattttgacttcaacagattccactgtcacttctccccacgtgactggcaaagactcatcaacaacaactggggattccgacccaagagactcaacttcaagctctttaacattcaagtcaaagaggtcacgcagaatgacggtacgacgacgattgccaataaccttaccagcacggttcaggtgtttactgactcggagtaccagctcccgtacgtcctcggctcggcgcatcaaggatgcctcccgccgttcccagcagacgtcttcatggtcccacagtatggatacctcaccctgaacaacgggagtcaggcggtaggacgctcttccttttactgcctggagtactttccttctcagatgcttcgtaccggaaacaactttaccttcagctacacctttgaagacgtgcctttccacagtagctacgctcacagccagagtctggatcggctgatgaatcctcttatcgaccagtacctgtattatctaaacaaaacacaatcaaatagtggaactcttcagcagtctcggctactgtttagtcaagctggacccaccagcatgtctcttcaagctaaaaactggctgcctggaccttgctacagacaacagcgtctgtcaaagcaggcaaacgacaacaacaacagcaactttccctggactgcggctacaaagtatcatctaaatggccgggactcgttggttaatccaggaccagctatggccagccacaaagacgatgaagaaaagtttttccccatgcatggaaccctgatatttggtaaacaaggaacaaatgctaacgacgcggatttggacaatgtcatgattacagatgaagaagaaatccgcaccaccaatcccgtggctacggagcagtacgggactgtgtcaaataatttgcaaaactcaaatactggtccaactactggaactgtcaatcaccaaggagcgttacctggtatggtgtggcaggatcgagacgtgtacctgcagggacccatttgggccaagattcctcacaccgatggacactttcatccttctccactgatgggaggttttggactcaaacacccgcctcctcagatcatgatcaaaaacactcccgttccagccaatcctcctacaaacttcagttctgccaagtttgcttccttcatcacacagtattccacaggacaagtcggcgtggagattgagtgggagctgcagaaggagaacagcaaacgctggaaccccgagatccagtacacttccaactacaacaaatctgttaatgtggactttactgtggacactaatggcgtgtattcagagcctcgccccattggcaccagatacctgactcgtaatctgtaa

SEQ ID NO: 4382 - DNA, 2208 bp, synthetic construct
  misc_feature 1..2208: note = source = /note="Description of Artificial Sequence: Synthetic polynucleotide"
  source 1..2208: mol_type = other DNA
atggctgccgatggttatcttccagattggctcgaggacactctctctgaaggaataagacagtggtggaagctcaaacctggcccaccaccgccaaagcccgcagagcggcacaaggacgacagtaggggtcttgtgcttcctgggtacaagtacctcggacccttcaacggactcgacaaaggagagccggtcaacgaggcagacgccgcggccctcgagcacgacaaggcctacgaccggcagctcgacagcggagacaacccgtacctcaagtacaaccacgccgacgcggagtttcaggagcgtcttaaagaagatacgtcttttgggggcaacctcggacgagcagtattccaggcgaaaaagagggttcttgaacctctgggcctggttgaggagcctgttaagacggctccgggaaaaaagaggccggtagagcactctcctgtggagccagactcctcctcgggaaccggaaaagcgggccagcagcctgcaagaaaaagattgaattttggtcagactggagacgcagactccgtacctgacccccagcctctcggacagccaccagcagcccccacaagtttgggatctactacaatggctacaggcagtggcgcaccaatggcagacaataacgagggtgccgatggagtgggtaattcctcaggaaattggcattgcgattcccaatggctgggcgacagagtcatcaccaccagcacccgaacctgggccctgcccacctacaacaaccacctctacaagcaaatctccagccaatcaggagcatcgaacgacaaccactactttggctacagcaccccttgggggtattttgacttcaacagattccactgtcacttctccccacgtgactggcaaagactcatcaacaacaactggggattccgacccaagagactcaacttcaagctctttaacattcaagtcaaagaggtcacgcagaatgacggtacgacgacgattgccaataaccttaccagcacggttcaggtgtttactgactcggagtaccagcccccgtacgtcctcggctcggcgcatcaaggatgcctcccgccgttcccagcagacgtcttcatggtcccacagtatggatacctcaccctgaacaacgggagtcaggcggtaggacgctcttccttttactgcctggagtactttccttctcagatgcttcgtaccggaaacaactttaccttcagctacacctttgaagacgtgcctttccacagtagctacgctcacagccagagtctggatcggctgatgaatcctcttatcgaccagtacctgtattatctaaacaaaacacaatcaaatagtggaactcttcagcagtctcggctactgtttagtcaagctggacccaccagcatgtctcttcaagctaaaaactggctgcctggaccttgctacagacaacagcgtctgtcaaagcaggcaaacgacaacaacaacagcaactttccctggactgcggctacaaagtatcatctaaatggccgggactcgttggttaatccaggaccagctatggccagccacaaagacgatgaagaaaagtttttccccatgcatggaaccctgatatttggtaaacaaggaacaaatgctaacgacgcggatttggacaatgtcatgattacagatgaagaagaaatccgcaccaccaatcccgtggctacggagcagtacgggactgtgtcaaataatttgcaaaactcaaatactggtccaactactggaactgtcaatcaccaaggagcgttacctggtatggtgtggcaggatcgagacgtgtacctgcagggacccatttgggccaagattcctcacaccgatggacactttcatccttctccactgatgggaggttttggactcaaacacccgcctcctcagatcatgatcaaaaacactcccgttccagccaatcctcctacaaacttcagttctgccaagtttgcttccttcatcacacagtattccacgggacaagtcagcgtggagattgagtgggagctgcagaaggagaacagcaaacgctggaaccccgagatccagtacacttccaactacaacaaatctgttaatgtggactttactgtggacactaatggcgtgtattcagagcctcgccccattggcaccagatacctgactcgtaatctgtaa

SEQ ID NO: 4383 - DNA, 2208 bp, synthetic construct
  misc_feature 1..2208: note = source = /note="Description of Artificial Sequence: Synthetic polynucleotide"
  source 1..2208: mol_type = other DNA
atggctgccgatggttatcttccagattggctcgaggacactctctctgaaggaataagacagtggtggaagctcaaacctggcccaccaccgccaaagcccgcagagcggcacaaggacgacagtaggggtcttgtgcttcctgggtacaagtacctcggacccttcaacggactcgacaaaggagagccggtcaacgaggcagacgccgcggccctcgagcacgacaaggcctacgaccggcagctcgacagcggagacaacccgtacctcaagtacaaccacgccgacgcggagtttcaggagcgtcttaaagaagatacgtcttttgggggcaacctcggacgagcagtattccaggcgaaaaagagggttcttgaacctctgggcctggttgaggagcctgttaagacggctccgggaaaaaagaggccggtagagcactctcctgtggagccagactcctcctcgggaaccggaaaagcgggccagcagcctgcaagaaaaagattgaattttggtcagactggagacgcagactccgtacctgacccccagcctctcggacagccaccagcagcccccacaagtttgggatctactacaatggctacaggcagtggcgcaccaatggcagacaatgacgagggtgccgatggagtgggtaattcctcaggaaattggcattgcgattcccaatggctgggcgacagagtcatcaccaccagcacccgaacctgggccctgcccacctacaacaaccacctctacaagcaaatctccagccaatcaggagcatcgaacgacaaccactactttggctacagcaccccttgggggtattttgacttcaacagattccactgtcacttctccccacgtgactggcaaagactcatcaacaacaactggggattccgacccaagagactcaacttcaagctctttaacattcaagtcaaagaggtcacgcagaatgacggtacgacgacgattgccaataaccttaccagcacggttcaggtgtttactgactcggagtaccagctcccgtacgtcctcggctcggcgcatcaaggatgcctcccgccgttcccagcagacgtcttcatggtcccacagtatggatacctcaccctgaacaacgggagtcaggcggtaggacgctcttccttttactgcctggagtactttccttctcagatgcttcgtaccggaaacaactttaccttcagctacacctttgaagacgtgcctttccacagtagctacgctcacagccagagtctggatcggctgatgaatcctcttatcgaccagtacctgtattatctaaacaaaacacaatcaaatagtggaactcttcagcagtctcggctactgtttagtcaagctggacccaccagcatgtctcttcaagctaaaaactggctgcctggaccttgctacagacaacagcgtctgtcaaagcaggcaaacgacaacaacaacagcaactttccctggactgcggctacaaagtatcatctaaatggccgggactcgttggttaatccaggaccagctatggccagccacaaagacgatgaagaaaagtttttccccatgcatggaaccctgatatttggtaaacaaggaacaaatgctaacgacgcggatttggacaatgtcatgattacagatgaagaagaaatccgcaccaccaatcccgtggctacggagcagtacgggactgtgtcaaataatttgcaaaactcaaatactggtccaactactggaactgtcaatcaccaaggagcgttacctggtatggtgtggcaggatcgagacgtgtacctgcagggacccatttgggccaagattcctcacaccgatggacactttcatccttctccactgatgggaggttttggactcaaacacccgcctcctcagatcatgatcaaaaacactcccgttccagccaatcctcctacaaacttcagttctgccaagtttgcttccttcatcacacagtattccacaggacaagtcagcgtggagattgagtgggagctgcagaaggagaacagcaaacgctggaaccccgagatccagtacacttccaactacaacaaatctgttaatgtggactttactgtggacactaatggcgtgtattcagagcctcgccccattggcaccagatacctgactcgtaatctgtaa

SEQ ID NO: 4384 - DNA, 2208 bp, synthetic construct
  misc_feature 1..2208: note = source = /note="Description of Artificial Sequence: Synthetic polynucleotide"
  source 1..2208: mol_type = other DNA
atggctgccgatggttatcttccagattggctcgaggacactctctctgaaggaataagacagtggtggaagctcaaacctggcccaccaccgccaaagcccgcagagcggcacaaggacgacagtaggggtcttgtgcttcctgggtacaagtacctcggacccttcaacggactcgacaaaggagagccggtcaacgaggcagacgccgcggccctcgagcacgacaaggcctacgaccggcagctcgacagcggagacaacccgtacctcaagtacaaccacgccgacgcggagtttcaggagcgtcttaaagaagatacgtcttttgggggcaacctcggacgagcagtattccaggcgaaaaagagggttcttgaacctctgggcctggttgaggagcctgttaagacggctccgggaaaaaagaggccggtagagcactctcctgtggagccagactcctcctcgggaaccggaaaagcgggccagcagcctgcaagaaaaagattgaattttggtcagactggagacgcagactccgtacctgacccccagcctctcggacagccaccagcagcccccacaagtttgggatctactacaatggctacaggcagtggcgcaccaatggcagacaataacgagggtgccgatggagtgggtaattcctcaggaaattggcattgcgattcccaatggctgggcgacagagtcatcaccaccagcacccgaacctgggccctgcccacctacaacaaccacctctacaagcaaatctccagccaatcaggagcatcgaacgacaaccactactttggctacagcaccccttgggggtattttgacttcaacagattccactgtcacttctccccacgtgactggcaaagactcatcaacaacaactggggattccgacccaagagactcaacttcaagctctttaacattcaagtcaaagaggtcacgcagaatgacggtacgacgacgattgccaataaccttaccagcacggttcaggtgtttactgactcggagtaccagctcccgtacgtcctcggctcggcgcatcaaggatgcctcccgccgttcccagcagacgtcttcatggtcccacagtatggatacctcaccctgaacaacgggagtcaggcggtaggacgctcttccttttactgcctggagtactttccttctcagatgcttcgtaccggaaacaactttaccttcagctacacctttgaagacgtgcctttccacagtagctacgctcacagccagagtctggatcggctgatgaatcctcttatcgaccagtacctgtattatctaaacaaaacacaatcaaatagtggaactcttcagcagtctcggctactgtttagtcaagctggacccaccagcatgtctcttcaagctaaaaactggctgcctggaccttgctacagacaacagcgtctgccaaagcaggcaaacgacaacaacaacagcaactttccctggactgcggctacaaagtatcatctaaatggccgggactcgttggttaatccaggaccagctatggccagccacaaagacgatgaagaaaagtttttccccatgcatggaaccctgatatttggtaaacaaggaacaaatgctaacgacgcggatttggacaatgtcatgattacagatgaagaagaaatccgcaccaccaatcccgtggctacggagcagtacgggactgtgtcaaataatttgcaaaactcaaatactggtccaactactggaactgtcaatcaccaaggagcgttacctggtatggtgtggcaggatcgagacgtgtacctgcagggacccatttgggccaagattcctcacaccgatggacactttcatccttctccactgatgggaggttttggactcaaacacccgcctcctcagatcatgatcaaaaacactcccgttccagccaatcctcctacaaacttcagttctgccaagtttgcttccttcatcacacagtattccacgggacaagtcagcgtggagattgagtgggagctgcagaaggagaacagcaaacgctggaaccccgagatccagtacacttccaactacaacaaatctgttaatgtggactttactgtggacactaatggcgtgtattcagagcctcgccccattggcaccagatacctgactcgtaatctgtaa

SEQ ID NO: 4385 - DNA, 2208 bp, synthetic construct
  misc_feature 1..2208: note = source = /note="Description of Artificial Sequence: Synthetic polynucleotide"
  source 1..2208: mol_type = other DNA
atggctgccgatggttatcttccagattggctcgaggacactctctctgaaggaataagacagtggtggaagctcaaacctggcccaccaccgccaaagcccgcagagcggcacaaggacgacagtaggggtcttgtgcttcctgggtacaagtacctcggacccttcaacggactcgacaaaggagagccggtcaacgaggcagacgccgcggccctcgagcacgacaaggcctacgaccggcagctcgacagcggagacaacccgtacctcaagtacaaccacgccgacgcggagtttcaggagcgtcttaaagaagatacgtcttttgggggcaacctcggacgagcagtattccaggcgaaaaagagggttcttgaacctctgggcctggttgaggagcctgttaagacggctccgggaaaaaagaggccggtagagcactctcctgtggagccagactcctcctcgggaaccggaaaagcgggccagcagcctgcaagaaaaagattgaattttggtcagactggagacgcagactccgtacctgacccccagcctctcggacagccaccagcagcccccacaagtttgggatctactacaatggctacaggcagtggcgcaccaatggcagacaataacgagggtgccgatggagtgggtaattcctcaggaaattggcattgcgattcccaatggctgggcgacagagtcatcaccaccagcacccgaacctgggccctgcccacctacaacaaccacctctacaagcaaatctccagccaatcaggagcatcgaacgacaaccactactttggctacagcaccccttgggggtattttgacttcaacagattccactgtcacttctccccacgtgactggcaaagactcatcaacaacaactggggattccgacccaagagactcaacttcaagctctttaacattcaagtcaaagaggtcacgcagaatgacggtacgacgacgattgccaataaccttaccagcacggttcaggtgtttactgactcggagtaccagctcccgtacgtcctcggctcggcgcatcaaggatgcctcccgccgttcccagcagacgtcttcatggtcccacagtatggatacctcaccctgaacaacgggagtcaggcggtaggacgctcttccttttactgcctggagtactttccttctcagatgcttcgtaccggaaacaactttaccttcagctacacctttgaagacgtgcctttccacagtagctacgctcacagccagagtctggatcggctgatgaatcctcttatcgaccagtacctgtattatctaaacaaaacacaatcaaatagtggaactcttcagcagtctcggctactgtttagtcaagctggacccaccagcatgtctcttcaagctaaaaactggctgcctggaccttgctacagacaacagcgtctgtcaaagcaggcaaacgacaacaacaacagcaactttccctggactgcggctacaaagtatcatctaaatggccgggactcgttggttaatccaggaccagctatggccagccacaaagacgatgaagaaaagtttttccccatgcatggaaccctgatatttggtaaacaaggaacaaatgctaacgacgcggatttggacaatgtcatgattacagatgaagaagaaatccgcaccaccaatcccgtggctacggagcagtacgggactgtgtcaaataatttgcaaaactcaaatactggtccaactactggaactgtcaatcaccaaggagcgttacctggtatggtgtggcaggatcgagacgtgtacctgcagggacccatttgggccaagattcctcacaccgatggacactttcatccttctccactgatgggaggttttggactcaaacacccgcctcctcagatcatgatcaaaaacactcccgttccagccaatcctcctacaaacctcagttctgccaagtttgcttccttcatcacacagtattccacgggacaagtcagcgtggagattgagtgggagctgcagaaggagaacagcaaacgctggaaccccgagatccagtacacttccaactacaacaaatctgttaatgtggactttactgtggacactaatggcgtgtattcagagcctcgccccattggcaccagatacctgactcgtaatctgtaa

SEQ ID NO: 4386 - DNA, 2208 bp, synthetic construct
  misc_feature 1..2208: note = source = /note="Description of Artificial Sequence: Synthetic polynucleotide"
  source 1..2208: mol_type = other DNA
atggctgccgatggttatcttccagattggctcgaggacactctctctgaaggaataagacagtggtggaagctcaaacctggcccaccaccgccaaagcccgcagagcggcacaaggacgacagtaggggtcttgtgcttcctgggtacaagtacctcggacccttcaacggactcgacaaaggagagccggtcaacgaggcagacgccgcggccctcgagcacgacaaggcctacgaccggcagctcgacagcggagacaacccgtacctcaagtacaaccacgccgacgcggagtttcaggagcgtcttaaagaagatacgtcttttgggggcaacctcggacgagcagtattccaggcgaaaaagagggttcttgaacctctgggcctggttgaggagcctgttaagacggctccgggaaaaaagaggccggtagagcactctcctgtggagccagactcctcctcgggaaccggaaaagcgggccagcagcctgcaagaaaaagattgaattttggtcagactggagacgcagactccgtacctgacccccagcctctcggacagccaccagcagcccccacaagtttgggatctactacaatggctacaggcagtggcgcaccaatggcagacaataacgagggtgccgatggagtgggtaattcctcaggaaattggcattgcgattcccaatggctgggcgacagagtcatcaccaccagcacccgaacctgggccctgcccacctacaacaaccacctctacaagcaaatctccagccaatcaggagcatcgaacgacaaccactactttggctacagcaccccttgggggtattttgacttcaacagattccactgtcacttctccccacgtgactggcaaagactcatcaacaacaactggggattccgacccaagagactcaacttcaagctctttaacattcaagtcaaagaggtcacgcagaatgacggtacgacgacgattgccaataaccttaccagcacggttcaggtgtttactgactcggagtaccagctcccgtacgtcctcggctcggcgcatcaaggatgcctcccgccgttcccagcagacgtcttcatggtcccacagtatggatacctcaccccgaacaacgggagtcaggcggtaggacgctcttccttttactgcctggagtactttccttctcagatgcttcgtaccggaaacaactttaccttcagctacacctttgaagacgtgcctttccacagtagctacgctcacagccagagtctggatcggctgatgaatcctcttatcgaccagtacctgtattatctaaacaaaacacaatcaaatagtggaactcttcagcagtctcggctactgtttagtcaagctggacccaccagcatgtctcttcaagctaaaaactggctgcctggaccttgctacagacaacagcgtctgtcaaagcaggcaaacgacaacaacaacagcaactttccctggactgcggctacaaagtatcatctaaatggccgggactcgttggttaatccaggaccagctatggccagccacaaagacgatgaagaaaagtttttccccatgcatggaaccctgatatttggtaaacaaggaacaaatgctaacgacgcggatttggacaatgtcatgattacagatgaagaagaaatccgcaccaccaatcccgtggctacggagcagtacgggactgtgtcaaataatttgcaaaactcaaatactggtccaactactggaactgtcaatcaccaaggagcgttacctggtatggtgtggcaggatcgagacgtgtacctgcagggacccatttgggccaagattcctcacaccgatggacactttcatccttctccactgatgggaggttttggactcaaacacccgcctcctcagatcatgatcaaaaacactcccgttccagccaatcctcctacaaacttcagttctgccaagtttgcttccttcatcacacagtattccacaggacaagtcagcgtggagattgagtgggagctgcagaaggagaacagcaaacgctggaaccccgagatccagtacacttccaactacaacaaatctgttaatgtggactttactgtggacactaatggcgtgtattcagagcctcgccccattggcaccagatacctgactcgtaatctgtaa

SEQ ID NO: 4387 - DNA, 2208 bp, synthetic construct
  misc_feature 1..2208: note = source = /note="Description of Artificial Sequence: Synthetic polynucleotide"
  source 1..2208: mol_type = other DNA
atggctgccgatggttatcttccagattggctcgaggacactctctctgaaggaataagacagtggtggaagctcaaacctggcccaccaccgccaaagcccgcagagcggcacaaggacgacagtaggggtcttgtgcttcctgggtacaagtacctcggacccttcaacggactcgacaaaggagagccggtcaacgaggcagacgccgcggccctcgagcacgacaaggcctacgaccggcagctcgacagcggagacaacccgtacctcaagtacaaccacgccgacgcggagtttcaggagcgtcttaaagaagatacgtcttttgggggcaacctcggacgagcagtattccaggcgaaaaagagggttcttgaacctctgggcctggttgaggagcctgttaagacggctccgggaaaaaagaggccggtagagcactctcctgtggagccagactcctcctcgggaaccggaaaagcgggccagcagcctgcaagaaaaagattgaattttggtcagactggagacgcagactccgtacctgacccccagcctctcggacagccaccagcagcccccacaagtttgggatctactacaatggctacaggcagtggcgcaccaatggcagacaataacgagggtgccgatggagtgggtaattcctcaggaaattggcattgcgattcccaatggctgggcgacagagtcatcaccaccagcacccgaacctgggccctgcccacctacaacaaccacctctacaagcaaatctccagccaatcaggagcatcgaacgacaaccactactttggctacagcaccccttgggggtattttgacttcaacagattccactgtcacttctccccacgtgactggcaaagactcatcaacaacaactggggattccgacccaagagactcaacttcaagctctttaacattcaagtcaaagaggtcacgcagaatgacggtacgacgacgattgccaataaccttaccagcacggttcaggtgtttactgactcggagtaccagctcccgtacgtcctcggctcggcgcatcaaggatgcctcccgccgttcccagcagacgtcttcatggtcccacagtatggatacctcaccctgaacaacgggagtcaggcggtaggacgctcttccttttactgcctggagtactttccttctcagatgcttcgtaccggaaacaactttaccttcagctacacctttgaagacgtgcctttccacagtagctacgctcacagccagagtctggatcggctgatgaatcctcttatcgaccagtacctgtattatctaaacaaaacacaatcaaatagtggaactcttcggcagtctcggctactgtttagtcaagctggacccaccagcatgtctcttcaagctaaaaactggctgcctggaccttgctacagacaacagcgtctgtcaaagcaggcaaacgacaacaacaacagcaactttccctggactgcggctacaaagtatcatctaaatggccgggactcgttggttaatccaggaccagctatggccagccacaaagacgatgaaggaaagtttttccccatgcatggaaccctgatatttggtaaacaaggaacaaatgctaacgacgcggatttggacaatgtcatgattacagatgaagaagaaatccgcaccaccaatcccgtggctacggagcagtacgggactgtgtcaaataatttgcaaaactcaaatactggtccaactactggaactgtcaatcaccaaggagcgttacctggtatggtgtggcaggatcgagacgtgtacctgcagggacccatttgggccaagattcctcacaccgatggacactttcatccttctccactgatgggaggttttggactcaaacacccgcctcctcagatcatgatcaaaaacactcccgttccagccaatcctcctacaaacttcagttctgccaagtttgcttccttcatcacacagtattccacaggacaagtcagcgtggagattgagtgggagctgcagaaggagaacagcaaacgctggaaccccgagatccagtacacttccaactacaacaaatctgttaatgtggactttactgtggacactaatggcgtgtattcagagcctcgccccattggcaccagatacctgactcgtaatctgtaa

SEQ ID NO: 4388 - DNA, 2208 bp, synthetic construct
  misc_feature 1..2208: note = source = /note="Description of Artificial Sequence: Synthetic polynucleotide"
  source 1..2208: mol_type = other DNA
atggctgccgatggttatcttccagattggctcgaggacactctctctgaaggaataagacagtggtggaagctcaaacctggcccaccaccgccaaagcccgcagagcggcacaaggacgacagtaggggtcttgtgcttcctgggtacaagtacctcggacccttcaacggactcgacaaaggagagccggtcaacgaggcagacgccgcggccctcgagcacgacaaggcctacgaccggcagctcgacagcggagacaacccgtacctcaagtacaaccacgccgacgcggagtttcaggagcgtcttaaagaagatacgtcttttgggggcaacctcggacgagcagtattccaggcgaaaaagagggttcttgaacctctgggcctggttgaggagcctgttaagacggctccgggaaaaaagaggccggtagagcactctcctgtggagccagactcctcctcgggaaccggaaaagcgggccagcagcctgcaagaaaaagattgaattttggtcagactggagacgcagactccgtacctgacccccagcctctcggacagccaccagcagcccccacaagtttgggatctactacaatggctacaggcagtggcgcaccaatggcagacaataacgagggtgccgatggagtgggtaattcctcaggaaattggcattgcgattcccaatggctgggcgacagagtcatcaccaccagcacccgaacctgggccctgcccacctacaacaaccacctctacaagcaaatctccagccaatcaggagcatcgaacgacaaccactactttggctacagcaccccttgggggtattttgacttcaacagattccactgtcacttctccccacgtgactggcaaagactcatcaacaacaactggggattccgacccaagagactcaacttcaagctctttaacattcaagtcaaagaggtcacgcagaatgacggtacgacgacgattgccaataaccttaccagcacggttcaggtgtttactgactcggagtaccagctcccgtacgtcctcggctcggcgcatcaaggatgcctcccgccgttcccagcagacgtcttcatggtcccacagtatggatacctcaccctgaacaacgggagtcaggcggtaggacgctcttccttttactgcctggagtactttccttctcagatgcttcgtaccggaaacaactttaccttcagctacacctttgaagacgtgcctttccacagtagctacgctcacagccagagtctggatcggctgatgaatcctcttatcgaccagtacctgtattatctaaacaaaacacaatcaaatagtggaactcttcagcagtctcggctactgtttagtcaagctggacccaccagcatgtctcttcaagctaaaaactggctgcctggaccttgctacagacaacagcgtctgtcaaagcaggcaaacgacaacaacaacagcaactttccctggactgcggctacaaagtatcatctaaatggccgggactcgttggttaatccaggaccagctatggccagccacaaagacgatgaagaaaagtttttccccatgcatggaaccctgatatttggtaaacaaggaacaaatgctaacgacgcggatttggacaatgccatgattacagatgaagaagaaatccgcaccaccaatcccgtggctacggagcagtacgggactgtgtcaaataatttgcaaaactcaaatactggtccaactactggaactgtcaatcaccaaggagcgttacctggtatggtgtggcaggatcgagacgtgtacctgcagggacccatttgggccaagattcctcacaccgatggacactttcatccttctccactgatgggaggttttggactcaaacacccgcctcctcagatcatgatcaaaaacactcccgttccagccaatcctcctacaaacttcagttctgccaagtttgcttccttcatcacacagtattccacaggacaagtcagcgtggagattgagtgggagctgcagaaggagaacagcaaacgctggaaccccgagatccagtacacttccaactacaacaaatctgttaatgtggactttactgtggacactaatggcgtgtattcagagcctcgccccattggcaccagatacctgactcgtaatctgtaa

SEQ ID NO: 4389 - DNA, 2208 bp, synthetic construct
  misc_feature 1..2208: note = source = /note="Description of Artificial Sequence: Synthetic polynucleotide"
  source 1..2208: mol_type = other DNA
atggctgccgatggttatcttccagattggctcgaggacactctctctgaaggaataagacagtggtggaagctcaaacctggcccaccaccgccaaagcccgcagagcggcacaaggacgacagtaggggtcttgtgcttcctgggtacaagtacctcggacccttcaacggactcgacaaaggagagccggtcaacgaggcagacgccgcggccctcgagcacgacaaggcctacgaccggcagctcgacagcggagacaacccgtacctcaagtacaaccacgccgacgcggagtttcaggagcgtcttaaagaagatacgtcttttgggggcaacctcggacgagcagtattccaggcgaaaaagagggttcttgaacctctgggcctggttgaggagcctgttaagacggctccgggaaaaaagaggccggtagagcactctcctgtggagccagactcctcctcgggaaccggaaaagcgggccagcagcctgcaagaaaaagattgaattttggtcagactggagacgcagactccgtacctgacccccagcctctcggacagccaccagcagcccccacaagtttgggatctactacaatggctacaggcagtggcgcaccaatggcaggcaataacgagggtgccgatggagtgggtaattcctcaggaaattggcattgcgattcccaatggctgggcgacagagtcatcaccaccagcacccgaacctgggccctgcccacctacaacaaccacctctacaagcaaatctccagccaatcaggagcatcgaacgacaaccactactttggctacagcaccccttgggggtattttgacttcaacagattccactgtcacttctccccacgtgactggcaaagactcatcaacaacaactggggattccgacccaagagactcaacttcaagctctttaacattcaagtcaaagaggtcacgcagaatgacggtacgacgacgattgccaataaccttaccagcacggttcaggtgtttactgactcggagtaccagctcccgtacgtcctcggctcggcgcatcaaggatgcctcccgccgttcccagcagacgtcttcatggtcccacagtatggatacctcaccctgaacaacgggagtcaggcggtaggacgctcttccttttactgcctggagtactttccttctcagatgcttcgtaccggaaacaactttaccttcagctacacctttgaagacgtgcctttccacagtagctacgctcacagccagagtctggatcggctgatgaatcctcttatcgaccagtacctgtattatctaaacaaaacacaatcaaatagtggaactcttcagcagtctcggctactgtttagtcaagctggacccaccagcatgtctcttcaagctaaaaactggctgcctggaccttgctacagacaacagcgtctgtcaaagcaggcaaacgacaacaacaacagcaactttccctggactgcggctacaaagtatcatctaaatggccgggactcgttggttaatccaggaccagctatggccagccacaaagacgatgaagaaaagtttttccccatgcatggaaccctgatatttggtaaacaaggaacaaatgctaacgacgcggatttggacaatgtcatgattacagatgaagaagaaatccgcaccaccaatcccgtggctacggagcagtacgggactgtgtcaaataatttgcaaaactcaaatactggtccaactactggaactgtcaatcaccaaggagcgttacctggtatggtgtggcaggatcgagacgtgtacctgcagggacccatttgggccaagattcctcacaccgatggacactttcatccttctccactgatgggaggttttggactcaaacacccgcctcctcagatcatgatcaaaaacactcccgttccagccaatcctcctacaaacttcagttctgccaagtttgcttccttcatcacacagtattccacaggacaagtcagcgtggagattgagtgggagctgcagaaggagaacagcaaacgctggaaccccgagatccagtacacttccaactacaacaaatctgttaatgtggactttactgtggacactaatggcgtgtattcagagcctcgccccattggcaccagatacctgactcgtaatctgtaa

SEQ ID NO: 4390 - DNA, 2208 bp, synthetic construct
  misc_feature 1..2208: note = source = /note="Description of Artificial Sequence: Synthetic polynucleotide"
  source 1..2208: mol_type = other DNA
atggctgccgatggttatcttccagattggctcgaggacactctctctgaaggaataagacagtggtggaagctcaaacctggcccaccaccgccaaagcccgcagagcggcacaaggacgacagtaggggtcttgtgcttcctgggtacaagtacctcggacccttcaacggactcgacaaaggagagccggtcaacgaggcagacgccgcggccctcgagcacgacaaggcctacgaccggcagctcgacagcggagacaacccgtacctcaagtacaaccacgccgacgcggagtttcaggagcgtcttaaagaagatacgtcttttgggggcaacctcggacgagcagtattccaggcgaaaaagagggttcttgaacctctgggcctggttgaggagcctgttaagacggctccgggaaaaaagaggccggtagagcactctcctgtggagccagactcctcctcgggaaccggaaaagcgggccagcagcctgcaagaaaaagattgaattttggtcagactggagacgcagactccgtacctgacccccagcctctcggacagccaccagcagcccccacaagtttgggatctactacaatggctacaggcagtggcgcaccaatggcagacaataacgagggtgccgatggagtgggtaattcctcaggaaattggcattgcgattcccaatggctgggcgacagagtcatcaccaccagcacccgaacctgggccctgcccacctacaacaaccacctctacaagcaaatctccagccaatcaggagcatcgaacgacaaccactactttggctacagcaccccttgggggtattttgacttcaacagattccactgtcacttctccccacgtgactggcaaagactcatcaacaacaactggggattccgacccaagagactcaacttcaagctctttaacattcaagtcaaagaggtcgcgcagaatgacggtacgacgacgattgccaataaccttaccagcacggttcaggtgtttactgactcggagtaccagctcccgtacgtcctcggctcggcgcatcaaggatgcctcccgccgttcccagcagacgtcttcatggtcccacagtatggatacctcaccctgaacaacgggagtcaggcggtaggacgctcttccttttactgcctggagtactttccttctcagatgcttcgtaccggaaacaactttaccttcagctacacctttgaagacgtgcctttccacagtagctacgctcacagccagagtctggatcggctgatgaatcctcttatcgaccagtacctgtattatctaaacaaaacacaatcaaatagtggaactcttcagcagtctcggctactgtttagtcaagctggacccaccagcatgtctcttcaagctaaaaactggctgcctggaccttgctacagacaacagcgtctgtcaaagcaggcaaacgacaacaacaacagcaactttccctggactgcggctacaaagtatcatctaaatggccgggactcgttggttaatccaggaccagctatggccagccacaaagacgatgaagaaaagtttttccccatgcatggaaccctgatatttggtaaacaaggaacaaatgctaacgacgcggatttggacaatgtcatgattacagatgaagaagaaatccgcaccaccaatcccgtggctacggagcagtacgggactgtgtcaaataatttgcaaaactcaaatactggtccaactactggaactgtcaatcaccaaggagcgttacctggtatggtgtggcaggatcgagacgtgtacctgcagggacccatttgggccaagattcctcacaccgatggacactttcatccttctccactgatgggaggttttggactcaaacacccgcctcctcagatcatgatcaaaaacactcccgttccagccaatcctcctacaaacttcagttctgccaagtttgcttccttcatcacacagtattccacaggacaagtcagcgtggagattgagtgggagctgcagaaggagaacagcaaacgctggaaccccgagatccagtacacttccaactacaacaaatctgttaatgtggactttactgtggacactaatggcgtgtattcagagcctcgccccattggcaccagatacctgactcgtaatctgtaa

SEQ ID NO: 4391 - DNA, 2208 bp, synthetic construct
  misc_feature 1..2208: note = source = /note="Description of Artificial Sequence: Synthetic polynucleotide"
  source 1..2208: mol_type = other DNA
atggctgccgatggttatcttccagattggctcgaggacactctctctgaaggaataagacagtggtggaagctcaaacctggcccaccaccgccaaagcccgcagagcggcacaaggacgacagtaggggtcttgtgcttcctgggtacaagcacctcggacccttcaacggactcgacaaaggagagccggtcaacgaggcagacgccgcggccctcgagcacgacaaggcctacgaccggcagctcgacagcggagacaacccgtacctcaagtacaaccacgccgacgcggagtttcaggagcgtcttaaagaagatacgtcttttgggggcaacctcggacgagcagtattccaggcgaaaaagagggttcttgaacctctgggcctggttgaggagcctgttaagacggctccgggaaaaaagaggccggtagagcactctcctgtggagccagactcctcctcgggaaccggaaaagcgggccagcagcctgcaagaaaaagattgaattttggtcagactggagacgcagactccgtacctgacccccagcctctcggacagccaccagcagcccccacaagtttgggatctactacaatggctacaggcagtggcgcaccaatggcagacaataacgagggtgccgatggagtgggtaattcctcaggaaattggcattgcgattcccaatggctgggcgacagagtcatcaccaccagcacccgaacctgggccctgcccacctacaacaaccacctctacaagcaaatctccagccaatcaggagcatcgaacgacaaccactactttggctacagcaccccttgggggtattttgacttcaacagattccactgtcacttctccccacgtgactggcaaagactcatcaacaacaactggggattccgacccaagagactcaacttcaagctctttaacattcaagtcaaagaggtcacgcagaatgacggtacgacgacgattgccaataaccttaccagcacggttcaggtgtttactgactcggagtaccagctcccgtacgtcctcggctcggcgcatcaaggatgcctcccgccgttcccagcagacgtcttcatggtcccacagtatggatacctcaccctgaacaacgggagtcaggcggtaggacgctcttccttttactgcctggagtactttccttctcagatgcttcgtaccggaaacaactttaccttcagctacacctttgaagacgtgcctttccacagtagctacgctcacagccagagtctggatcggctgatgaatcctcttatcgaccagtacctgtattatctaaacaaaacacaatcaaatagtggaactcttcagcagtctcggctactgtttagtcaagctggacccaccagcatgtctcttcaagctaaaaactggctgcctggaccttgctacagacaacagcgtctgtcaaagcaggcaaacgacaacaacaacagcaactttccctggactgcggctacaaagtatcatctaaatggccgggactcgttggttaatccaggaccagctatggccagccacaaagacgatgaagaaaagtttttccccatgcatggaaccctgatatttggtaaacaaggaacaaatgctaacgacgcggatttggacaatgtcatgattacagatgaagaagaaatccgcaccaccaatcccgtggctacggagcagtacgggactgtgtcaaataatttgcaaaactcaaatactggtccaactactggaactgtcaatcaccaaggagcgttacctggtatggtgtggcaggatcgagacgtgtacctgcagggacccatttgggccaagattcctcacaccgatggacactttcatccttctccactgatgggaggttttggactcaaacacccgcctcctcagatcatgatcaaaaacactcccgttccagccaatcctcctacaaacttcagttctgccaagtttgcttccttcatcacacagtattccacaggacaagtcagcgtggagattgagtgggagctgcagaaggagaacagcaaacgctggaaccccgagatccagtacacttccaactacaacaaatctgttaatgtggactttactgtggacactaatggcgtgtattcagagcctcgccccattggcaccagatacctgactcgtaatctgtaa

SEQ ID NO: 4392 - DNA, 2208 bp, synthetic construct
  misc_feature 1..2208: note = source = /note="Description of Artificial Sequence: Synthetic polynucleotide"
  source 1..2208: mol_type = other DNA
atggctgccgatggttatcttccagattggcccgaggacactctctctgaaggaataagacagtggtggaagctcaaacctggcccaccaccgccaaagcccgcagagcggcacaaggacgacagtaggggtcttgtgcttcctgggtacaagtacctcggacccttcaacggactcgacaaaggagagccggtcaacgaggcagacgccgcggccctcgagcacgacaaggcctacgaccggcagctcgacagcggagacaacccgtacctcaagtacaaccacgccgacgcggagtttcaggagcgtcttaaagaagatacgtcttttgggggcaacctcggacgagcagtattccaggcgaaaaagagggttcttgaacctctgggcctggttgaggagcctgttaagacggctccgggaaaaaagaggccggtagagcactctcctgtggagccagactcctcctcgggaaccggaaaagcgggccagcagcctgcaagaaaaagattgaattttggtcagactggagacgcagactccgtacctgacccccagcctctcggacagccaccagcagcccccacaagtttgggatctactacaatggctacaggcagtggcgcaccaatggcagacaataacgagggtgccgatggagtgggtaattcctcaggaaattggcattgcgattcccaatggctgggcgacagagtcatcaccaccagcacccgaacctgggccctgcccacctacaacaaccacctctacaagcaaatctccagccaatcaggagcatcgaacgacaaccactactttggctacagcaccccttgggggtattttgacttcaacagattccactgtcacttctccccacgtgactggcaaagactcatcaacaacaactggggattccgacccaagagactcaacttcaagctctttaacattcaagtcaaagaggtcacgcagaatgacggtacgacgacgattgccaataaccttaccagcacggttcaggtgtttactgactcggagtaccagctcccgtacgtcctcggctcggcgcatcaaggatgcctcccgccgttcccagcagacgtcttcatggtcccacagtatggatacctcaccctgaacaacgggagtcaggcggtaggacgctcttccttttactgcctggagtactttccttctcagatgcttcgtaccggaaacaactttaccttcagctacacctttgaagacgtgcctttccacagtagctacgctcacagccagagtctggatcggctgatgaatcctcttatcgaccagtacctgtattatctaaacaaaacacaatcaaatagtggaactcttcagcagtctcggctactgtttagtcaagctggacccaccagcatgtctcttcaagctaaaaactggctgcctggaccttgctacagacaacagcgtctgtcaaagcaggcaaacgacaacaacaacagcaactttccctggactgcggctacaaagtatcatctaaatggccgggactcgttggttaatccaggaccagctatggccagccacaaagacgatgaagaaaagtttttccccatgcatggaaccctgatatttggtaaacaaggaacaaatgctaacgacgcggatttggacaatgtcatgattacagatgaagaagaaatccgcaccaccaatcccgtggctacggagcagtacgggactgtgtcaaataatttgcaaaactcaaatactggtccaactactggaactgtcaatcaccaaggagcgttacctggtatggtgtggcaggatcgagacgtgtacctgcagggacccatttgggccaagattcctcacaccgatggacactttcatccttctccactgatgggaggttttggactcaaacacccgcctcctcagatcatgatcaaaaacactcccgttccagccaatcctcctacaaacttcagttctgccaagtttgcttccttcatcacacagtattccacaggacaagtcagcgtggagattgagtgggagctgcagaaggagaacagcaaacgctggaaccccgagatccagtacacttccaactacaacaaatctgttaatgtggactttactgtggacactaatggcgtgtattcagagcctcgccccattggcaccagatacctgactcgtaatctgtaa

SEQ ID NO: 4393 - DNA, 2208 bp, synthetic construct
  misc_feature 1..2208: note = source = /note="Description of Artificial Sequence: Synthetic polynucleotide"
  source 1..2208: mol_type = other DNA
atggctgccgatggttatcttccagattggctcgaggacactctctctgaaggaataagacagtggtggaagctcaaacctggcccaccaccgccaaagcccgcagagcggcacaaggacgacagtaggggtcttgtgcttcctgggtacaagtacctcggacccttcaacggactcgacaaaggagagccggtcaacgaggcagacgccgcggccctcgagcacgacaaggcctacgaccggcagctcgacagcggagacaacccgtacctcaagtacaaccacgccgacgcggagtttcaggagcgtcttaaagaagatacgtcttttgggggcaacctcggacgagcagtattccaggcgaaaaagagggttcttgaacctctgggcctggttgaggagcctgttaagacggctccgggaaaaaagaggccggtagagcactctcctgtggagccagactcctcctcgggaaccggaaaagcgggccagcagcctgcaagaaaaagattgaattttggtcagactggagacgcagactccgtacctgacccccagcctctcggacagccaccagcagcccccacaagtttgggatctactacaatggctacaggcagtggcgcaccaatggcagacaataacgagggtgccgatggagtgggtaattcctcaggaaattggcattgcgattcccaatggctgggcgacagagtcatcaccaccagcacccgaacctgggccctgcccacctacaacaaccacctctacaagcaaatctccagccaatcaggagcatcgaacgacaaccactactttggctacagcaccccttgggggtattttgacttcaacagattccactgtcacttctccccacgtgactggcaaagactcatcaacaacaactggggattccgacccaagagactcaacttcaagctctttaacattcaagtcaaagaggtcacgcagaatgacggtacgacgacgattgccaataaccttaccagcacggttcaggtgtttactgactcggagtaccagctcccgtacgtcctcggctcggcgcatcaaggatgcctcccgccgttcccagcagacgtcttcatggtcccacagtatggatacctcaccctgaacaacgggagtcaggcggtaggacgctcttccttttactgcctggagtactttccttctcagatgcttcgtaccggaaacaactttaccttcagctacacctttgaagacgtgcctttccacagtagctacgctcacagccagagtctggatcggctgatgaatcctcttatcgaccagtacctgtattatctaaacaaaacacaatcaaatagtggaactcttcagcagtctcggctactgtttagtcaagctggacccaccagcatgtctcttcaagctaaaaactggctgcctggaccttgctacagacaacagcgtctgtcaaagcaggcaaacgacaacaacaacagcaactttccctggactgcggctacaaagtatcatctaaatggccgggactcgttggttaatccaggaccagctatggccagccacaaagacgatgaagaaaagtttttccccatgcatggaaccctgatatttggtaaacaaggaacaaatgctaacgacgcggatttggacaatgtcatgattacagatgaagaagaaatccgcaccaccaatcccgtggctacggagcagtacgggactgtgtcaaataatttgcaaaactcaaatactggtccaactactggaactgtcaatcaccaaggagcgttacctggtatggtgtggcaggatcgaggcgtgtacctgcagggacccatttgggccaagattcctcacaccgatggacactttcatccttctccactgatgggaggttttggactcaaacacccgcctcctcagatcatgatcaaaaacactcccgttccagccaatcctcctacaaacttcagttctgccaagtttgcttccttcatcacacagtattccacgggacaagtcagcgtggagattgagtgggagctgcagaaggagaacagcaaacgctggaaccccgagatccagtacacttccaactacaacaaatctgttaatgtggactttactgtggacactaatggcgtgtattcagagcctcgccccattggcaccagatacctgactcgtaatctgtaa

SEQ ID NO: 4394 - DNA, 2208 bp, synthetic construct
  misc_feature 1..2208: note = source = /note="Description of Artificial Sequence: Synthetic polynucleotide"
  source 1..2208: mol_type = other DNA
atggctgccgatggttatcttccagattggctcgaggacactctctctgaaggaataagacagtggtggaagctcaaacctggcccaccaccgccaaagcccgcagagcggcacaaggacgacagtaggggtcttgtgcttcctgggtacaagtacctcggacccttcaacggactcgacaaaggagagccggtcaacgaggcagacgccgcggccctcgagcacgacaaggcctacgaccggcagctcgacagcggagacaacccgtacctcaagtacaaccacgccgacgcggagtttcaggagcgtcttaaagaagatacgtcttttgggggcaacctcggacgagcagtattccaggcgaaaaagagggttcttgaacctctgggcctggttgaggagcctgttaagacggctccgggaaaaaagaggccggtagagcactctcctgtggagccagactcctcctcgggaaccggaaaagcgggccagcagcctgcaagaaaaagattgaattttggtcagactggagacgcagactccgtacctgacccccagcctctcggacagccaccagcagcccccacaagtttgggatctactacaatggctacaggcagtggcgcaccaatggcagacaataacgagggtgccgatggagtgggtaattcctcaggaaattggcattgcgattcccaatggctgggcgacagagtcatcaccaccagcacccgaacctgggccctgcccacctacaacaaccacctctacaagcaaatctccagccaatcaggagcatcgaacgacaaccactactttggctacagcaccccttgggggtattttgacttcaacagattccactgtcacttctccccacgtgactggcaaagactcatcaacaacaactggggattccgacccaagagactcaacttcaagctctttaacattcaagtcaaagaggtcacgcagaatgacggtacgacgacgattgccaataaccttaccagcacggttcaggtgtttactgactcggagtaccagctcccgtacgtcctcggctcggcgcatcaaggatgcctcccgccgttcccagcagacgtcttcatggtcccacagtatggatacctcaccctgaacaacgggagtcaggcggtaggacgctcttccttttactgcctggagtactttccttctcagatgcttcgtaccggaaacaactttaccttcagctacacctttgaagacgtgcctttccacagtagctacgctcacagccagagtctggatcggctgatgaatcctcttatcgaccagtacctgtattatctaaacaaaacacaatcaaatagtggaactcttcagcagtctcggctactgtttagtcaagctggacccaccagcatgtctcttcaagctaaaaactggctgcctggaccttgctacagacaacagcgtctgtcaaagcaggcaaacgacaacaacaacagcaactttccctggactgcggctacaaagtatcatctaaatggccgggactcgttggttaatccaggaccagctatggccagccacaaagacgatgaagaaaagtttttccccatgcatggaaccctgatatttggtaaacaaggaacaaatgctaacgacgcggatttggacaatgtcatgattacagatgaagaagaaatccgcaccaccaatcccgtggctacggagcagtacgggactgtgtcaaataatttgcaaaactcaaatactggtccaactactggaactgtcaatcaccaaggagcgttacctggtatggtgtggcaggatcgagacgtgtacctgcagggacccatttgggccaagattcctcacaccgatggacactttcatccttctccactgatgggaggttttggactcaaacacccgcctcctcagatcatgatcaaaaacactcccgttccagccaatcctcctacaaacttcagttctgccaagtttgcttccttcatcacacagtattccacgggacaagtcagcgtggagattgagtgggagctgcagaaggagaacagcaaacgctggaaccccgagatccagtacacttccaactacaacaaatctgttaatgtggactttactgtgggcactaatggcgtgtattcagagcctcgccccattggcaccagatacctgactcgtaatctgtaa

SEQ ID NO: 4395 - DNA, 2208 bp, synthetic construct
  misc_feature 1..2208: note = source = /note="Description of Artificial Sequence: Synthetic polynucleotide"
  source 1..2208: mol_type = other DNA
atggctgccgatggttatcttccagattggctcgaggacactctctctgaaggaataagacagtggtggaagctcaaacctggcccaccaccaccaaagcccgcagagcggcatcaggacgacagcaggggtcttgtgcttcctgggtacaagtacctcggacccctcaacggactcgacaaaggagagccggtcaacgaggcagacgctgcggccctcgagcacgacaaggcctacgaccggcagctcgacagcggagacaacccgtacctcaagtacaaccacgccgacgcggagtttcaggagcgtcttaaagaagatacgtcttttgggggcaacctcggacgagcagtcttccaggcgaaaaagagggttcttgaacctctgggcctggttgaggaacctgttaagacggctccgggaaaaaagaggccggtagagcactctcctgcggagccagactcctcctcgggaaccggaaaagcgggccagcagcctgcaagaaagagattgaatttcggtcagactggagacgcagactccgtacctgacccccagcctctcggacagccaccagcagcccccacaagtttgggatctactacaatggctacaggcagtggcgcaccaatggcagacaataacgagggtgccgatggagtgggtaattcctcaggaaattggcattgcgattcccaatggctgggcgacagagtcatcaccaccagcacccgaacctgggccctgcccacctacaacaaccacctctacaagcaaatctccagccaatcaggagcatcgaacgacaaccactactttggctacagcaccccttgggggtattttgacttcaacagattccactgtcacttctccccacgtgactggcaaagactcatcaacaacaactggggattccgacccaagagactcaacttcaagctctttaacattcaagtcaaagaggtcacgcagaatgacggtacgacgacgattgccaataaccttaccagcacggttcaggtgtttactgactcggagtaccagctcccgtacgtcctcggctcggcgcatcaaggatgcctcccgccgtttccagcggacgtcttcatggtcccacagtatggatacctcaccctgaacaacgggagtcaggcggtaggacgctcttccttttactgcctggagtactttccttctcagatgctgcgtaccggaaacaactttaccttcagctacacctttgaggacgtgcctttccacagcagctacgctcacagccagagtttggaccggctgatgaatcctctgatcgaccagtatctgtattatctgaacaggacacaatcaaatagtggaactcttcagcagtctaggctactgtttagccaagctggacccaccagcatgtctcttcaagctaaaaactggctgcctggaccttgctacagacagcagcgtctgtcaaagcaggcaaacgacaacaacaacagcaactttccctggactgcggctacaaagtatcatctaaatggtcgggactcgttggttaatccaggaccagctatggccagccacaaagacgatgaagaaaagtttttccccatgcatggaaccctgatatttggtaaacaaggaacaaatgctaacgacgcggatttggaacatgtcatgattacagatgaagaagaaatcaggaccaccaatcccgtggctacagagcagtacggaaacgtgtcaaataatttgcaaaactcaaatactggtccaactacagaaaatgtcaatcaccagggagcgttacctggtatggtgtggcaggatcgagacgtgtacctgcagggacccatttgggccaagattcctcacaccgacggacactttcacccttctccactgatgggaggttttggactcaaacacccgcctcctcaaatcatgatcaaaaacactcctgttccagccaatcctcctacaaacttcagcgcggcaaagtttgcttccttcatcacacagtattccacgggacaggtcagcgtggagatcgagtgggagctgcagaaggagaacagcaaacgctggaaccccgagatccagtacacttccaactacaacaaatctgttaatgtggactttactgtggacactaatggtgtgtattcagagcctcgccccattggcaccagatacctgactcgtaatctgtaa

SEQ ID NO: 4396 - DNA, 2208 bp, synthetic construct
  misc_feature 1..2208: note = source = /note="Description of Artificial Sequence: Synthetic polynucleotide"
  source 1..2208: mol_type = other DNA
atggctgccgatggttatcttccagattggctcgaggacactctctctgaaggaataagacagtggtggaagctcaaacctggcccaccaccaccaaagcccgcagagcggcatcaggacgacagcaggggtcttgtgcttcctgggtacaagtacctcggacccttcaacggactcgacaaaggagagccggtcaacgaggcagacgctgcggccctcgagcacgacaaggcctacgaccggcagctcgacagcggagacaacccgtacctcaagtacaaccacgccgacgcggagtttcaggagcgtcttaaagaagatacgtcttttgggggcaacctcggacgagcagtcttccaggcgaaaaagagggttcttgaacctctgggcctggttgaggaacctgttaagacggctccgggaaaaaagaggccggtagagcactctcctgcggagccagactcctcctcgggaaccggaaaagcgggccagcagcctgcaagaaagagattgaatttcggtcagactggagacgcagactccgtacctgacccccagcctctcggacagccaccagcagcccccacaagtttgggatctactacaatggctacaggcagtggcgcaccaatggcagacaataacgagggtgccgatggagtgggtaattcctcaggaaattggcattgcgattcccaatggctgggcgacagagtcatcaccaccagcacccgaacctgggccctgcccacctacaacaaccacctctacaagcaaatctccagccaatcaggagcatcgaacgacaaccactactttggctacagcaccccttgggggtattttgacttcaacagattccactgtcacttctccccacgtgactggcaaagactcatcaacaacaactggggattccgacccaagagactcaacttcaagctctttaacattcaagtcaaagaggtcacgcagaatgacggtacgacgacgattgccaataaccttaccagcacgattcaggtgtttactgactcggagtaccagctcccgtacgtcctcggctcggcgcatcaaggatgcctcccgccgtttccagcggacgtcttcatggtcccacagtatggatacctcaccctgaacaacgggagtcaggcggtaggacgctcttccttttactgcctggagtactttccttctcagatgctgcgtaccggaaacaactttaccttcagctacacctttgaggacgtgcctttccacagcagctacgctcacagccagagtttggaccggctgatgaatcctctgatcgaccagtatctgtattatctgaacaggacacaatcaaatagtggaactcttcagcagtctaggctactgtttagccaagctggacccaccagcatgtctcttcaagctaaaaactggctgcctggaccttgctacagacagcagcgtctgtcaaagcaggcaaacgacaacaacaacagcaactttccctggactgcggctacaaagtatcatctaaatggtcgggactcgttggttaatccaggaccagctatggccagccacaaagacgatgaagaaaagtttttccccatgcatggaaccctgatatttggtaaacaaggaacaaatgctaacgacgcggatttggaacatgtcatgattacagatgaagaagaaatcaggaccaccaatcccgtggctacagagcagtacggaaacgtgtcaaataatttgcaaaactcaaatactggtccaactacagaaaatgtcaatcaccagggagcgttacctggtatggtgtggcaggatcgagacgtgtacctgcagggacccatttgggccaagattcctcacaccgacggacactttcacccttctccactgatgggaggttttggactcaaacacccgcctcctcaaatcatgatcaaaaacactcctgttccagccaatcctcctacaaacttcagcgcggcaaagtttgcttccttcatcacacagtattccacgggacaggtcagcgtggagatcgagtgggagctgcagaaggagaacagcaaacgctggaaccccgagatccagtacacttccaactacaacaaatctgttaatgtggactttactgtggacactaatggtgtgtattcagagcctcgccccattggcaccagatacctgactcgtaatctgtaa

SEQ ID NO: 4397 - DNA, 2208 bp, synthetic construct
  misc_feature 1..2208: note = source = /note="Description of Artificial Sequence: Synthetic polynucleotide"
  source 1..2208: mol_type = other DNA
atggctgccgatggttatcttccagattggctcgaggacactctctctgaaggaataagacagtggtggaagctcaaacctggcccaccaccaccaaagcccgcagagcggcatcaggacgacagcaggggtcttgtgcttcctgggtacaagtacctcggacccttcaacggactcgacaaaggagagccggtcaacgaggcagacgctgcggccctcgagcacgacaaggcctacgaccggcagctcgacagcggagacaacccgtacctcaagtacaaccacgccgacgcggagtttcaggagcgtcttaaagaagatacgtcttttgggggcaacctcggacgagcagtcttccaggcgaaaaagagggttcttgaacctctgggcctggttgaggaacctgttaagacggctccgggaaaaaagaggccggtagggcactctcctgcggagccagactcctcctcgggaaccggaaaagcgggccagcagcctgcaagaaagagattgaatttcggtcagactggagacgcagactccgtacctgacccccagcctctcggacagccaccagcagcccccacaagtttgggatctactacaatggctacaggcagtggcgcaccaatggcagacaataacgagggtgccgatggagtgggtaattcctcaggaaattggcattgcgattcccaatggctgggcgacagagtcatcaccaccagcacccgaacctgggccctgcccacctacaacaaccacctctacaagcaaatctccagccaatcaggagcatcgaacgacaaccactactttggctacagcaccccttgggggtattttgacttcaacagattccactgtcacttctccccacgtgactggcaaagactcatcaacaacaactggggattccgacccaagagactcaacttcaagctctttaacattcaagtcaaagaggtcacgcagaatgacggtacgacgacgattgccaataaccttaccagcacggttcaggtgtttactgactcggagtaccagctcccgtacgtcctcggctcggcgcatcaaggatgcctcccgccgtttccagcggacgtcttcatggtcccacagtatggatacctcaccctgaacaacgggagtcaggcggtaggacgctcttccttttactgcctggagtactttccttctcagatgctgcgtaccggaaacaactttaccttcagctacacctttgaggacgtgcctttccacagcagctacgctcacagccagagtttggaccggctgatgaatcctctgatcgaccagtatctgtattatctgaacaggacacaatcaaatagtggaactcttcagcagtctaggctactgtttagccaagctggacccaccagcatgtctcttcaagctaaaaactggctgcctggaccttgctacagacagcagcgtctgtcaaagcaggcaaacgacaacaacaacagcaactttccctggactgcggctacaaagtatcatctaaatggtcgggactcgttggttaatccaggaccagctatggccagccacaaagacgatgaagaaaagtttttccccatgcatggaaccctgatatttggtaaacaaggaacaaatgctaacgacgcggatttggaacatgtcatgattacagatgaagaagaaatcaggaccaccaatcccgtggctacagagcagtacggaaacgtgtcaaataatttgcaaaactcaaatactggtccaactacagaaaatgtcaatcaccagggagcgttacctggtatggtgtggcaggatcgagacgtgtacctgcagggacccatttgggccaagattcctcacaccgacggacactttcacccttctccactgatgggaggttttggactcaaacacccgcctcctcaaatcatgatcaaaaacactcctgttccagccaatcctcctacaaacttcagcgcggcaaagtttgcttccttcatcacacagtattccacgggacaggtcagcgtggagatcgagtgggagctgcagaaggagaacagcaaacgctggaaccccgagatccagtacacttccaactacaacaaatctgttaatgtggactttactgtggacactaatggtgtgtattcagagcctcgccccattggcaccagatacctgactcgtaatctgtaa

SEQ ID NO: 4398 - DNA, 2208 bp, synthetic construct
  misc_feature 1..2208: note = source = /note="Description of Artificial Sequence: Synthetic polynucleotide"
  source 1..2208: mol_type = other DNA
atggctgccgatggttatcttccagattggctcgaggacactctctctgaaggaataagacagtggtggaagctcaaacctggcccaccaccaccaaagcccgcagagcggcatcaggacgacagcaggggtcttgtgcttcctgggtacaagtacctcggacccttcaacggactcgacaaaggagagccggtcaacgaggcagacgctgcggccctcgagcacgacaaggcctacgaccggcagctcgacagcggagacaacccgtacctcaagtacaaccacgccgacgcggagtttcaggagcgtcttaaagaagatacgtcttttgggggcaacctcggacgagcagtcttccaggcgaaaaagagggttcttgaacctctgggcctggttgaggaacctgttaagacggctccgggaaaaaagaggccggtagagcactctcctgcggagccagactcctcctcgggaaccggaaaagcgggccagcagcctgcaagaaagagattgaatttcggtcagactggagacgcagactccgtacctgacccccagcctctcggacagccaccagcagcccccacaagtttgggatctactacaatggctacaggcagtggcgcaccaatggcagacaataacgagggtgccgatggagtgggtaattcctcaggaaattggcattgcgattcccaatggctgggcgacagagtcatcaccaccagcacccgaacctgggccctgcccacctacaacaaccacctctacaagcaaatctccagccaatcaggagcatcgaacgacaaccactactttggctacagcaccccttgggggtattttgacttcaacagattccactgtcacttctccccacgtgactggcaaagactcatcaacaacaactggggattccgacccaagagactcaacttcaagctctttaacattcaagtcaaagaggtcacgcagaatgacggtacgacgacgattgccaataaccttaccagcacggttcaggtgtttactgactcggagtaccagctcccgtacgtcctcggctcggcgcatcaaggatgcctcccgccgtttccagcggacgtcttcatggtcccacagtatggatacctcaccctgaacaacgggagtcaggcggtaggacgctcttccttttactgcctggagtactttccttctcagatgctgcgtaccggaaacaactttaccttcagctacacctttgaggacgtgcctttccacagcagctacgctcacagccagagtttggaccggctgatgaatcctctgatcgaccagtatctgtattatctgaacaggacacaatcaaatagtggaactcttcagcagtctaggctactgtttagccaagctggacccaccagcatgtctcttcaagctaaaaactggctgcctggaccttgctacagacagcagcgtctgtcaaagcaggcaaacgacaacaacaacagcaactttccctggactgcggctacaaagtatcatctaaatggtcgggactcgttggttaatccaggaccagctatggccagccacaaagacgatgaagaaaagtttttccccatgcatggaaccctgatatttggtaaacaaggaacaaatgctaacgacgcggatttggaacatgtcatgattacagatgaagaagaaatcaggaccaccaatcccgtggctacagagcagtacggaaacgtgtcaaataatttgcaaaactcaaatactggtccaactacagaaaatgtcaatcaccagggagcgttacctggtatggtgtggcaggatcgagacgtgtacctgcagggacccatttgggccaagattcctcacaccgacggacactttcacccttctccactgatgggaggttttggactcaaacacccgcctcctcaaatcatgatcaaaaacactcctgttccagccaatcctcctacaaacttcagcgcggcaaagtttgcttccttcatcacacagtattccacgggacaggtcagcgtggagatcgagcgggagctgcagaaggagaacagcaaacgctggaaccccgagatccagtacacttccaactacaacaaatctgttaatgtggactttactgtggacactaatggtgtgtattcagagcctcgccccattggcaccagatacctgactcgtaatctgtaa

SEQ ID NO: 4399 - DNA, 2208 bp, synthetic construct
  misc_feature 1..2208: note = source = /note="Description of Artificial Sequence: Synthetic polynucleotide"
  source 1..2208: mol_type = other DNA
atggctgccgatggttatcttccagattggctcgaggacactctctctgaaggaataagacagtggtggaagctcaaacctggcccaccaccaccaaagcccgcagagcggcatcaggacgacagcaggggtcttgtgcttcctgggtacaagtacctcggacccttcaacggactcgacaaaggagagccggtcaacgaggcagacgctgcggccctcgagcacgacaaggcctacgaccggcagctcgacagcggagacaacccgtacctcaagtacaaccacgccgacgcggagtttcaggagcgtcttaaagaagatacgtcttttgggggcaacctcggacgagcagtcttccaggcgaaaaagagggttcttgaacctctgggcctggttgaggaacctgttaagacggctccgggaaaaaagaggccggtagagcactctcctgcggagccagactcctcctcgggaaccggaaaagcgggccagcagcctgcaagaaagagattgaatttcggtcagactggagacgcagactccgtacctgacccccagcctctcggacagccaccagcagcccccacaagtttgggatctactacaatggctacaggcagtggcgcaccaatggcagacaataacgagggtgccgatggagtgggtaattcctcaggaaattggcattgcgattcccaatggctgggcgacagagtcatcaccaccagcacccgaacctgggccctgcccacctacaacaaccacctctacaagcaaatctccagccaatcaggagcatcgaacgacaaccactactttggctacagcaccccttgggggtattttgacttcaacagattccactgtcacttctccccacgtgactggcaaagactcatcaacaacaactggggattccgacccaagagactcaacttcaagctctttaacattcaagtcaaagaggtcacgcagaatgacggtacgacgacgattgccaataaccttaccagcacggttcaggtgtttactgactcggagtaccagctcccgtacgtcctcggctcggcgcatcaaggatgcctcccgccgtttccagcggacgtcttcatggtcccacagtatggatacctcaccctgaacaacgggagtcaggcggtaggacgctcttccttttactgcctggagtactttccttctcagatgctgcgtaccggaaacaactttaccttcagctacacctttgaggacgtgcctttccacagcagctacgctcacagccagagtttggaccggctgatgaatcctctgatcgaccagtatctgtattatctgaacaggacacaatcaaatagtggaactcttcagcagtctaggctactgtttagccaagctggacccaccagcatgtctcttcaagctaaaaactggctgcctggaccttgctacagacagcagcgtctgtcaaagcaggcaaacgacaacaacaacagcaactttccctggactgcggctacaaagtatcatctaaatggtcgggactcgttggttaatccaggaccagctatggccagccacaaagacgatgaagaaaagtttttccccatgcatggaaccctgatatttggtaaacaaggaacaaatgctaacgacgcggatttggaacatgtcatgattacagatgaagaagaaatcaggaccaccaatcccgtggctacagagcagtacggaaacgtgtcaaataatttgcaaaactcaaatactggtccaactacagaaaatgtcaatcaccagggagcgttacctggtatggtgtggcaggatcgagacgtgtacctgcagggacccatttgggccaagattcctcacaccgacggacactttcacccttctccactgatgggaggttttggactcaaacacccgcctcctcaaatcatgatcaaaaacactcctgttccagccaatcctcctacaaacttcagcgcggcaaagtttgcttccttcatcacacagtattccacgggacaggtcagcgtggagatcgagtgggagctgcagaaggagaacagcaaacgctggaaccccgagatccagtacacttccaactacaacaaatctgttaatgtggaccttactgtggacactaatggtgtgtattcagagcctcgccccattggcaccagatacctgactcgtaatctgtaa

SEQ ID NO: 4400 - DNA, 2208 bp, synthetic construct
  misc_feature 1..2208: note = source = /note="Description of Artificial Sequence: Synthetic polynucleotide"
  source 1..2208: mol_type = other DNA
atggctgccgatggttatcttccagattggctcgaggacactctctctgaaggaataagacagtggtggaagctcaaacctggcccaccaccgccaaagcccgcagagcggcacaaggacgacagtaggggtcttgtgcttcctgggtacaagtacctcggacccttcaacggactcgacaaaggagagccggtcaacgaggcagacgccgcggccctcgagcacgacaaggcctacgaccggcagctcgacagcggagacaacccgtacctcaagtacaaccacgccgacgcggagtttcaggagcgtcttaaagaagatacgtcttttgggggcaacctcggacgagcagtattccaggcgaaaaagagggttcttgaacctctgggcctggttgaggagcctgttaagacggctccgggaaaaaagaggccggtagagcactctcctgtggagccagactcctcctcgggaaccggaaaagcgggccagcagcctgcaagaaaaagattgaattttggtcagactggagacgcagactccgtacctgacccccagcctctcggacagccaccagcagcccccacaagtttgggatctactacaatggctacaggcagtggcgcaccaatggcagacaataacgagggtgccgatggagtgggtaattcctcaggaaattggcattgcgattcccaatggctgggcgacagagtcatcaccaccagcacccgaacctgggccctgcccacctacaacaaccacctctacaagcaaatctccagccaatcaggagcatcgaacgacaaccactactttggccacagcaccccttgggggtattttgacttcaacagattccactgtcacttctccccacgtgactggcaaagactcatcaacaacaactggggattccgacccaagagactcaacttcaagctctttaacattcaagtcaaagaggtcacgcagaatgacggtacgacgacgattgccaataaccttaccagcacggttcaggtgtttactgactcggagtaccagctcccgtacgtcctcggctcggcgcatcaaggatgcctcccgccgttcccagcagacgtcttcatggtcccacagtatggatacctcaccctgaacaacgggagtcaggcggtaggacgctcttccttttactgcctggagtactttccttctcagatgcttcgtaccggaaacaactttaccttcagctacacctttgaagacgtgcctttccacagtagctacgctcacagccagagtctggatcggctgatgaatcctcttatcgaccagtacctgtattatctaaacaaaacacaatcaaatagtggaactcttcagcagtctcggctactgtttagtcaagctggacccaccagcatgtctcttcaagctaaaaactggctgcctggaccttgctacagacaacagcgtctgtcaaagcaggcaaacgacaacaacaacagcaactttccctggactgcggctacaaagtatcatctaaatggccgggactcgttggttaatccaggaccagctatggccagccacaaagacgatgaagaaaagtttttccccatgcatggaaccctgatatttggtaaacaaggaacaaatgctaacgacgcggatttggacaatgtcatgattacagatgaagaagaaatccgcaccaccaatcccgtggctacggagcagtacgggactgtgtcaaataatttgcaaaactcaaatactggtccaactactggaactgtcaatcaccaaggagcgttacctggtatggtgtggcaggatcgagacgtgtacctgcagggacccatttgggccaagattcctcacaccgatggacactttcatccttctccactgatgggaggttttggactcaaacacccgcctcctcagatcatgatcaaaaacactcccgttccagccaatcctcctacaaacttcagttctgccaagtttgcttccttcatcacacagtattccacgggacaagtcagcgtggagattgagtgggagctgcagaaggagaacagcaaacgctggaaccccgagatccagtacacttccaactacaacaaatctgttaatgtggactttactgtggacactaatggcgtgtattcagagcctcgccccattggcaccagatacctgactcgtaatctgtaa

SEQ ID NO: 4401 - DNA, 2208 bp, synthetic construct
  misc_feature 1..2208: note = source = /note="Description of Artificial Sequence: Synthetic polynucleotide"
  source 1..2208: mol_type = other DNA
atggctgccgatggttatcttccagattggctcgaggacactctctctgaaggaataagacagtggtggaagctcaaacctggcccaccaccgccaaagcccgcagagcggcacaaggacgacagtaggggtcttgtgcttcctgggtacaagtacctcggacccttcaacggactcgacaaaggagagccggtcaacgaggcagacgccgcggccctcgagcacgacaaggcctacgaccggcagctcgacagcggagacaacccgtacctcaagtacaaccacgccgacgcggagtttcaggagcgtcttaaagaagatacgtcttttgggggcaacctcggacgagcagtattccaggcgaaaaagagggttcttgaacctctgggcctggttgaggagcctgttaagacggctccgggaaaaaagaggccggtagagcactctcctgtggagccagactcctcctcgggaaccggaaaagcgggccagcagcctgcaagaaaaagattgaattttggtcagactggagacgcagactccgtacctgacccccagcctctcggacagccaccagcagcccccacaagtttgggatctactacaatggctacaggcagtggcgcaccaatggcagacaataacgagggtgccgatggagtgggtaattcctcaggaaattggcattgcgattcccaatggctgggcgacagagtcatcaccaccagcacccgaacctgggccctgcccacctacaacaaccacctctacaagcaaatctccagccaatcaggagcaccgaacgacaaccactactttggccacagcaccccttgggggtattttgacttcaacagattccactgtcacttctccccacgtgactggcaaagactcatcaacaacaactggggattccgacccaagagactcaacttcaagctctttaacattcaagtcaaagaggtcacgcagaatgacggtacgacgacgattgccaataaccttaccagcacggttcaggtgtttactgactcggagtaccagctcccgtacgtcctcggctcggcgcatcaaggatgcctcccgccgttcccagcagacgtcttcatggtcccacagtatggatacctcaccctgaacaacgggagccaggcggtaggacgctcttccttttactgcctggagtactttccttctcagatgcttcgtaccggaaacaactttaccttcagctacacctttgaagacgtgcctttccacagtagctacgctcacagccagagtctggatcggctgatgaatcctcttatcgaccagtacctgtattatctaaacaaaacacaatcaaatagtggaactcttcagcagtctcggctactgtttagtcaagctggacccaccagcatgtctcttcaagctaaaaactggctgcctggaccttgctacagacaacagcgtctgtcaaagcaggcaaacgacaacaacaacagcaactttccctggactgcggctacaaagtatcatctaaatggccgggactcgttggttaatccaggaccagctatggccagccacaaagacgatgaagaaaagtttttccccatgcatggaaccctgatatttggtaaacaaggaacaaatgctaacgacgcggatttggacaatgtcatgattacagatgaagaagaaatccgcaccaccaatcccgtggctacggagcagtacgggactgtgtcaaataatttgcaaaactcaaatactggtccaactactggaactgtcaatcaccaaggagcgttacctggtatggtgtggcaggatcgagacgtgtacctgcagggacccatttgggccaagattcctcacaccgatggacactttcatccttctccactgatgggaggttttggactcaaacacccgcctcctcagatcatgatcaaaaacactcccgttccagccaatcctcctacaaacttcagttctgccaagtttgcttccttcatcacacagtattccacgggacaagtcagcgtggagattgagtgggagctgcagaaggagaacagcaaacgctggaaccccgagatccagtacacttccaactacaacaaatctgttaatgtggactttactgtggacactaatggcgtgtattcagagcctcgccccattggcaccagatacctgactcgtaatctgtaa

SEQ ID NO: 4402 - DNA, 2208 bp, synthetic construct
  misc_feature 1..2208: note = source = /note="Description of Artificial Sequence: Synthetic polynucleotide"
  source 1..2208: mol_type = other DNA
atggctgccgatggttatcttccagattggctcgaggacactctctctgaaggaataagacagtggtggaagctcaaacctggcccaccaccgccaaagcccgcagagcggcacaaggacgacagtaggggtcttgtgcttcctgggtacaagtacctcggacccttcaacggactcgacaaaggagagccggtcaacgaggcagacgccgcggccctcgagcacgacaaggcctacgaccggcagctcgacagcggagacaacccgtacctcaagtacaaccacgccgacgcggagtttcaggagcgtcttaaagaagatacgtcttttgggggcaacctcggacgagcagtattccaggcgaaaaagagggttcttgaacctctgggcctggttgaggagcctgttaagacggctccgggaaaaaagaggccggtagagcactctcctgtggagccagactcctcctcgggaaccggaaaagcgggccagcagcctgcaagaaaaagattgaattttggtcagactggagacgcagactccgtacctgacccccagcctctcggacagccaccagcagcccccacaagtttgggatctactacaatggctacaggcagtggcgcaccaatggcagacaataacgagggtgccgatggagtgggtaattcctcaggaaattggcattgcgattcccaatggctgggcgacagagtcatcaccaccagcacccgaacctgggccctgcccacctacaacaaccacctctacaagcaaatctccagccaatcaggagcatcgaacgacaaccactactttggccacagcaccccttgggggtattttgacttcaacagattccactgtcacttctccccacgtgactggcaaagactcatcaacaacaactggggattccgacccaagagactcaacttcaagctctttaacattcaagtcaaagaggtcacgcagaatgacggtacgacgacgattgccaataaccttaccagcacggttcaggtgtttactgactcggagtaccagctcccgtacgtcctcggctcggcgcatcaaggatgcctcccgccgttcccagcagacgtcttcatggtcccacagtatggatacctcaccctgaacaacgggagtcaggcggtaggacgctcttccttttactgcctggagtactttccttctcagatgcttcgtaccggaaacaactttaccttcagctacacctttgaagacgtgcctttccacagtagctacgctcacagccagagtctggatcggctgatgaatcctcttatcgaccagtacctgtattatctaaacaaaacacaatcaaatagtggaactcttcagcagtctcggctactgtttagtcaagctggacccaccagcatgtctcttcaagctaaaaactggctgcctggaccttgctacagacaacagcgtctgtcaaagcaggcaaacgacaacaacaacagcaactttccctggactgcggctacaaagtatcatctaaatggccgggactcgttggttaatccaggaccagctatggccagccacaaagacgatgaagaaaagtttttccccatgcatggaaccctgatatttggtaaacaaggaacaaatgctaacgacgcggatttggacaatgtcatgattacagatgaagaagaaatccgcaccaccaatcccgtggctacggagcagtacgggactgtgtcaaataatttgcaaaactcaaatactggtccaactactggaactgtcaatcaccaaggagcgttacctggtatggtgtggcaggatcgagacgtgtacctgcagggacccatttgggccaagattcctcacaccgatggacactttcatccttctccactgatgggaggttttggactcaaacacccgcctcctcagatcatgatcaaaaacactcccgttccagccaatcctcctacaaacttcagttctgccaagtttgcttccttcatcacacagtattccacaggacaagtcggcgtggagattgagtgggagctgcagaaggagaacagcaaacgctggaaccccgagatccagtacacttccaactacaacaaatctgttaatgtggactttactgtggacactaatggcgtgtattcagagcctcgccccattggcaccagatacctgactcgtaatctgtaa

SEQ ID NO: 4403 - DNA, 2208 bp, synthetic construct
  misc_feature 1..2208: note = source = /note="Description of Artificial Sequence: Synthetic polynucleotide"
  source 1..2208: mol_type = other DNA
atggctgccgatggttatcttccagattggctcgaggacactctctctgaaggaataagacagtggtggaagctcaaacctggcccaccaccgccaaagcccgcagagcggcacaaggacgacagtaggggtcttgtgcttcctgggtacaagtacctcggacccttcaacggactcgacaaaggagagccggtcaacgaggcagacgccgcggccctcgagcacgacaaggcctacgaccggcagctcgacagcggagacaacccgtacctcaagtacaaccacgccgacgcggagtttcaggagcgtcttaaagaagatacgtcttttgggggcaacctcggacgagcagtattccaggcgaaaaagagggttcttgaacctctgggcctggttgaggagcctgttaagacggctccgggaaaaaagaggccggtagagcactctcctgtggagccagactcctcctcgggaaccggaaaagcgggccagcagcctgcaagaaaaagattgaattttggtcagactggagacgcagactccgtacctgacccccagcctctcggacagccaccagcagcccccacaagtttgggatctactacaatggctacaggcagtggcgcaccaatggcagacaataacgagggtgccgatggagtgggtaattcctcaggaaattggcattgcgattcccaatggctgggcgacagagtcatcaccaccagcacccgaacctgggccctgcccacctacaacaaccacctctacaagcaaatctccagccaatcaggagcatcgaacgacaaccactactttggccacagcaccccttgggggtattttgacttcaacagattccactgtcacttctccccacgtgactggcaaagactcatcaacaacaactggggattccgacccaagagactcaacttcaagctctttaacattcaagtcaaagaggtcacgcagaatgacggtacgacgacgattgccaataaccttaccagcacggttcaggtgtttactgactcggagtaccagctcccgtacgtcctcggctcggcgcatcaaggatgcctcccgccgttcccagcagacgtcttcatggtcccacagtatggatacctcaccctgaacaacgggagtcaggcggtaggacgctcttccttttactgcctggagtactttccttctcagatgcttcgtaccggaaacaactttaccttcagctacacctttgaagacgtgcctttccacagtagctacgctcacagccagagtctggatcggctgatgaatcctcttatcgaccagtacctgtattatctaaacaaaacaaacaatcaaagtggaaccttcacgcagtctcggctactgtttagtcaagctggacccaccagcattctcttcaagtctaaaaactggctgcctggaccttgctacagacaacagcgtctgtcaaagcgggcaaacgacaacaacaacagcaactttccctggactgcggctacaaagtatcatctaaatggccgggactcgttggttaatccaggaccagctatggccagccacaaagacgatgaagaaaagttttttccccagcatggaaccctgatatttggtaaacaaggaacaaagctaacagacgcggatttggacaatgtcatgattacagatgaagaagaaatccgcaccaccaatcccgtggctacggagcagtacgggactgtgtcaaataatttgcagaaactcaacatactggcaactactggaactgtcaacacacaaggagcgttacctggtatggtgtggcaggatcgagacgtgtacctgcagggacccatttgggccaagattcctcacaccgatggacactttcatccttctccactgatgggaggttttggactcaaacacccgcctcctcagatcatgatcaaaaacactcccgttccagccaatcctcctacaaacttcagttctgccaagtttgcttccttcatcacacagtattccacgggacaagtcagcgtggagattgagtgggagctgcagaaggagaacagcaaacgctggaaccccgagatccagtacacttccaactacaacaaatctgttaatgtggactttactgtggacactaatggcgtgtattcagagcctcgccccattggcaccagatacctgactcgtaatctgtaa

SEQ ID NO: 4404 - DNA, 2208 bp, synthetic construct
  misc_feature 1..2208: note = source = /note="Description of Artificial Sequence: Synthetic polynucleotide"
  source 1..2208: mol_type = other DNA
atggctgccgatggttatcttccagattggctcgaggacactctctctgaaggaataagacagtggtggaagctcaaacctggcccaccaccgccaaagcccgcagagcggcacaaggacgccagtaggggtcttgtgcttcctgggtacaagtacctcggacccttcaacggactcgacaaaggagagccggtcaacgaggcagacgccgcggccctcgagcacgacaaggcctacgaccggcagctcgacagcggagacaacccgtacctcaagtacaaccacgccgacgcggagtttcaggagcgtcttaaagaagatacgtcttttgggggcaacctcggacgagcagtattccaggcgaaaaagagggttcttgaacctctgggcctggttgaggagcctgttaagacggctccgggaaaaaagaggccggtagagcactctcctgtggagccagactcctcctcgggaaccggaaaagcgggccagcagcctgcaagaaaaagattgaattttggtcagactggagacgcagactccgtacctgacccccagcctctcggacagccaccagcagcccccacaagtttgggatctactacaatggctacaggcagtggcgcaccaatggcagacaataacgagggtgccgatggagtgggtaattcctcaggaaattggcattgcgattcccaatggctgggcgacagagtcatcaccaccagcacccgaacctgggccctgcccacctacaacaaccacctctacaagcaaatctccagccaatcaggagcatcgaacgacaaccactactttggctacagcaccccttgggggtattttgacttcaacagattccactgtcacttctccccacgtgactggcaaagactcatcaacaacaactggggattccgacccaagagactcaacttcaagctctttaacattcaagtcaaagaggtcacgcagaatgacggtacgacgacgattgccaataaccttaccagcacggttcaggtgtttactgactcggagtaccagctcccgtacgtcctcggctcggcgcatcaaggatgcctcccgccgttcccagcagacgtcttcatggtcccacagtatggatacctcaccctgaacaacgggagtcaggcggtaggacgctcttccttttactgcctggagtactttccttctcagatgcttcgtaccggaaacaactttaccttcagctacacctttgaagacgtgcctttccacagtagctacgctcacagccagagtctggatcggctgatgaatcctcttatcgaccagtacctgtattatctaaacaaaacaaacaatcaaagtggaaccttcacgcagtctcggctactgtttagtcaagctggacccaccagcattctcttcaagtctaaaaactggctgcctggaccttgctacagacaacagcgtctgtcaaagacagcaaacgacaacaacaacagcaactttccctggactgcggctacaaagtatcatctaaatggccgggactcgttggttaatccaggaccagctatggccagccacaaagacgatgaagaaaagttttttccccagcatggaaccctgatatttggtaaacaaggaacaaagctaacagacgcggatttggacaatgtcatgattacagatgaagaagaaatccgcaccaccaatcccgtggctacggagcagtacgggactgtgtcaaataatttgcagaaactcaacatactggcaactactggaactgtcaacacacaaggagcgttacctggtatggtgtggcaggatcgagacgtgtacctgcagggacccatttgggccaagattcctcacaccgatggacactttcatccttctccactgatgggaggttttggactcaaacacccgcctcctcagatcatgatcaaaaacactcccgttccagccaatcctcctacaaacttcagttctgccaagtttgcttccttcatcacacagtattccacgggacaagtcagcgtggagattgagtgggagctgcagaaggagaacagcaaacgctggaaccccgagatccagtacacttccaactacaacaaatctgttaatgtggactttactgtggacactaatggcgtgtattcagagcctcgccccattggcaccagatacctgactcgtaatctgtaa

SEQ ID NO: 4405 - DNA, 2208 bp, synthetic construct
  misc_feature 1..2208: note = source = /note="Description of Artificial Sequence: Synthetic polynucleotide"
  source 1..2208: mol_type = other DNA
atggctgccgatggttatcttccagattggctcgaggacactctctctgaaggaataagacagtggtggaagctcaaacctggcccaccaccgccaaagcccgcagagcggcacaaggacgacagtaggggtcttgtgcttcctgggtacaagtacctcggacccttcaacggactcgacaaaggagagccggtcaacgaggcagacgccgcggccctcgagcacgacaaggcctacgaccggcagctcgacagcggagacaacccgtacctcaagtacaaccacgccgacgcggagtttcaggagcgtcttaaagaagatacgtcttttgggggcaacctcggacgagcagtattccaggcgaaaaagagggttcttgaacctctgggcctggttgaggagcctgttaagacggctccgggaaaaaagaggccggtagagcactctcctgtggagccagactcctcctcgggaaccggaaaagcgggccagcagcctgcaagaaaaagattgaattttggtcagactggagacgcagactccgtacctgacccccagcctctcggacagccaccagcagcccccacaagtttgggatctactacaatggctacaggcagtggcgcaccaatggcagacaataacgagggtgccgatggagtgggtaattcctcaggaaattggcattgcgattcccaatggctgggcgacagagtcatcaccaccagcacccgaacctgggccctgcccacctacaacaaccacctctacaagcaaatctccagccaatcaggagcatcgaacgacaaccactactttggccacagcaccccttgggggtattttgacttcaacagattccactgtcacttctccccacgtgactggcaaagactcatcaacaacaactggggattccgacccaagagactcaacttcaagctctttaacattcaagtcaaagaggtcacgcagaatgacggtacgacgacgattgccaataaccttaccagcacggttcaggtgtttactgactcggagtaccagctcccgtacgtcctcggctcggcgcatcaaggatgcctcccgccgttcccagcagacgtcttcatggtcccacagtatggatacctcaccctgaacaacgggagtcaggcggtaggacgctcttccttttactgcctggagtactttccttctcagatgcttcgtaccggaaacaactttaccttcagctacacctttgaagacgtgcctttccacagtagctacgctcacagccagagtctggatcggctgatgaatcctcttatcgaccagtacctgtattatctaaacaaaacaaacaatcaaagtggaaccttcacgcagtctcggctactgtttagtcaagctggacccaccagcattctcttcaagtctaaaaactggctgcctggaccttgctacagacaacagcgtctgtcaaagacagcaaacgacaacaacaacagcaactttccctggactgcggctacaaagtatcatctaaatggccgggactcgttggttaatccaggaccagctatggccagccacaaagacgatgaagaaaagttttttccccagcatggaaccctgatatttggtaaacaaggaacaaagctaacagacgcggatttggacaatgtcatgattacagatgaagaagaaatccgcaccaccaatcccgtggctacggagcagtacgggactgtgtcaaataatttgcagaaactcaacatactggcaactactggaactgtcaacacacaaggagcgttacctggtatggtgtggcaggatcgagacgtgtacctgcagggacccatttgggccaagattcctcacaccgatggacactttcatccttctccactgatgggaggttttggactcaaacacccgcctcctcagatcatgatcaaaaacactcccgttccagccaatcctcctacaaacttcagttctgccaagtttgcttccttcatcacacagtattccacgggacaagtcagcgtggagattgagtgggagctgcagaaggagaacagcaaacgctggaaccccgagatccagtacacttccaactacaacaaatctgttaatgtggactttactgtggacactaatggcgtgtattcagagcctcgccccattggcaccagatacctgactcgtaatctgtaa

SEQ ID NO: 4406 - DNA, 2208 bp, synthetic construct
  misc_feature 1..2208: note = source = /note="Description of Artificial Sequence: Synthetic polynucleotide"
  source 1..2208: mol_type = other DNA
atggctgccgatggttatcttccagattggctcgaggacactctctctgaaggaataagacagtggtggaagctcaaacctggcccaccaccaccaaagcccgcagagcggcatcaggacgacagcaggggtcttgtgcttcctgggtacaagtacctcggacccttcaacggactcgacaaaggagagccggtcaacgaggcagacgctgcggccctcgagcacgacaaggcctacgaccggcagctcgacagcggagacaacccgtacctcaagtacaaccacgccgacgcggagtttcaggagcgtcttaaagaagatacgtcttttgggggcaacctcggacgagcagtcttccaggcgaaaaagagggttcttgaacctctgggcctggttgaggaacctgttaagacggctccgggaaaaaagaggccggtagagcactctcctgcggagccagactcctcctcgggaaccggaaaagcgggccagcagcctgcaagaaagagattgaatttcggtcagactggagacgcagactccgtacctgacccccagcctctcggacagccaccagcagcccccacaagtttgggatctactacaatggctacaggcagtggcgcaccaatggcagacaataacgagggtgccgatggagtgggtaattcctcaggaaattggcattgcgattcccaatggctgggcgacggagtcatcaccaccagcacccgaacctgggccctgcccacctacaacaaccacctctacaagcaaatctccagccaatcaggagcatcgaacgacaaccactactttggctacagcaccccttgggggtattttgacttcaacagattccactgtcacttctccccacgtgactggcaaagactcatcaacaacaactggggattccgacccaagagactcaacttcaagctctttaacattcaagtcaaagaggtcacgcagaatgacggtacgacgacgattgccaataaccttaccagcacggttcaggtgtttactgactcggagtaccagctcccgtacgtcctcggctcggcgcatcaaggatgcctcccgccgtttccagcggacgtcttcatggtcccacagtatggatacctcaccctgaacaacgggagtcaggcggtaggacgctcttccttttactgcctggagtactttccttctcagatgctgcgtaccggaaacaactttaccttcagctacacctttgaggacgtgcctttccacagcagctacgctcacagccagagtttggaccggctgatgaatcctctgatcgaccagtatctgtattatctgaacaggacacaatcaaatagtggaactcttcagcagtctaggctactgtttagccaagctggacccaccagcatgtctcttcaagctaaaaactggctgcctggaccttgctacagacagcagcgtctgtcaaagcaggcaaacgacaacaacaacagcaactttccctggactgcggctacaaagtatcatctaaatggtcgggactcgttggttaatccaggaccagctatggccagccacaaagacgatgaagaaaagtttttccccatgcatggaaccctgatatttggtaaacaaggaacaaatgctaacgacgcggatttggaacatgtcatgattacagatgaagaagaaatcaggaccaccaatcccgtggctacagagcagtacggaaacgtgtcaaataatttgcaaaactcaaatactggtccaactacagaaaatgtcaatcaccagggagcgttacctggtatggtgtggcaggatcgagacgtgtacctgcagggacccatttgggccaagattcctcacaccgacggacactttcacccttctccactgatgggaggttttggactcaaacacccgcctcctcaaatcatgatcaaaaacactcctgttccagccaatcctcctacaaacttcagcgcggcaaagtttgcttccttcatcacacagtattccacgggacaggtcagcgtggagatcgagtgggagctgcagaaggagaacagcaaacgctggaaccccgagatccagtacacttccaactacaacaaatctgttaatgtggactttactgtggacactaatggtgtgtattcagagcctcgccccattggcaccagatacctgactcgtaatctgtaa

SEQ ID NO: 4407 - DNA, 2208 bp, synthetic construct
  misc_feature 1..2208: note = source = /note="Description of Artificial Sequence: Synthetic polynucleotide"
  source 1..2208: mol_type = other DNA
atggctgccgatggttatcttccagattggctcgaggacactctctctgaaggaataagacagtggtggaagctcaaacctggcccaccaccaccaaagcccgcagagcggcatcaggacgacagcaggggtcttgtgcttcctgggtacaagtacctcggacccttcaacggactcgacaaaggagagccggtcaacgaggcagacgctgcggccctcgagcacgacaaggcctacgaccggcagctcgacagcggagacaacccgtacctcaagtacaaccacgccgacgcggagtttcaggagcgtcttaaagaagatacgtcttttgggggcaacctcggacgagcagtcttccaggcgaaaaagagggttcttgaacctctgggcctggttgaggaacctgttaagacggctccgggaaaaaagaggccggtagagcactctcctgcggagccagactcctcctcgggaaccggaaaagcgggccagcagcctgcaagaaagagattgaatttcggtcagactggagacgcagactccgtacctgacccccagcctctcggacagccaccagcagcccccacaagtttgggatctactacaatggctacaggcagtggcgcaccaatggcagacaataacgagggtgccgatggagtgggtaattcctcaggaaattggcattgcgattcccaatggctgggcgacagagtcatcaccaccagcacccgaacctgggccctgcccacctacaacaaccacctctacaagcaaatctccagccaatcaggagcatcgaacgacaaccactactttggctacagcaccccttgggggtattttgacttcaacagattccactgtcacttctccccacgtgactggcaaagactcatcaacaacaactggggattccgacccaagagactcaacttcaagctctttaacattcaagtcaaagaggtcacgcagaatgacggtacgacgacgattgccaataaccttaccagcacggttcaggcgtttactgactcggagtaccagctcccgtacgtcctcggctcggcgcatcaaggatgcctcccgccgtttccagcggacgtcttcatggtcccacagtatggatacctcaccctgaacaacgggagtcaggcggtaggacgctcttccttttactgcctggagtactttccttctcagatgctgcgtaccggaaacaactttaccttcagctacacctttgaggacgtgcctttccacagcagctacgctcacagccagagtttggaccggctgatgaatcctctgatcgaccagtatctgtattatctgaacaggacacaatcaaatagtggaactcttcagcagtctaggctactgtttagccaagctggacccaccagcatgtctcttcaagctaaaaactggctgcctggaccttgctacagacagcagcgtctgtcaaagcaggcaaacgacaacaacaacagcaactttccctggactgcggctacaaagtatcatctaaatggtcgggactcgttggttaatccaggaccagctatggccagccacaaagacgatgaagaaaagtttttccccatgcatggaaccctgatatttggtaaacaaggaacaaatgctaacgacgcggatttggaacatgtcatgattacagatgaagaagaaatcaggaccaccaatcccgtggctacagagcagtacggaaacgtgtcaaataatttgcaaaactcaaatactggtccaactacagaaaatgtcaatcaccagggagcgttacctggtatggtgtggcaggatcgagacgtgtacctgcagggacccatttgggccaagattcctcacaccgacggacactttcacccttctccactgatgggaggttttggactcaaacacccgcctcctcaaatcatgatcaaaaacactcctgttccagccaatcctcctacaaacttcagcgcggcaaagtttgcttccttcatcacacagtattccacgggacaggtcagcgtggagatcgagtgggagctgcagaaggagaacagcaaacgctggaaccccgagatccagtacacttccaactacaacaaatctgttaatgtggactttactgtggacactaatggtgtgtattcagagcctcgccccattggcaccagatacctgactcgtaatctgtaa

SEQ ID NO: 4408 - DNA, 2208 bp, synthetic construct
  misc_feature 1..2208: note = source = /note="Description of Artificial Sequence: Synthetic polynucleotide"
  source 1..2208: mol_type = other DNA
atggctgccgatggttatcttccagattggctcgaggacactctctctgaaggaataagacagtggtggaagctcaaacctggcccaccaccaccaaagcccgcagagcggcatcaggacgacagcaggggtcttgtgcttcctgggtacaagtacctcggacccttcaacggactcgacaaaggagagccggtcaacgaggcagacgctgcggccctcgagcacgacaaggcctacgaccggcagctcgacagcggagacaacccgtacctcaagtacaaccacgccgacgcggagtttcaggagcgtcttaaagaagatacgtcttttgggggcaacctcggacgagcagtcttccaggcgaaaaagagggttcttgaacctctgggcctggttgaggaacctgttaagacggctccgggaaaaaagaggccggtagagcactctcctgcggagccagactcctcctcgggaaccggaaaagcgggccagcagcctgcaagaaagagattgaatttcggtcagactggagacgcagactccgtacctgacccccagcctctcggacagccaccagcagcccccacaagtttgggatctactacaatggctacaggcagtggcgcaccaatggcagacaataacgagggtgccgatggagtgggtaattcctcaggaaattggcattgcgattcccaatggctgggcgacagagtcatcaccaccagcacccgaacctgggccctgcccacctacaacaaccacctctacaagcaaatctccagccaatcaggagcatcgaacgacaaccactactttggctacagcaccccttgggggtattttgacttcaacagattccactgtcacttctccccacgtgactggcaaagactcatcaacaacaactggggattccgacccaagagactcaacttcaagctctttaacattcaagtcaaagaggtcacgcagaatgacggtacgacgacgattgccaataaccttaccagcacggttcaggtgtttactgactcggagtaccagctcccgtacgtcctcggctcggcgcatcaaggatgcctcccgccgtttccagcggacgtcttcatggtcccacagtatggatacctcaccctgaacaacgggagtcaggcggtaggacgctcttccttttactgcctggagtactttccttctcagatgctgcgtaccggaaacaactttaccttcagctacacctttgaggacgtgcctttccacagcagctacgctcacagccagagtttggaccggctgatgaatcctctgatcgaccagtatctgtattatctgaacaggacacaatcaaatagtggaactcttcagcagtctaggctactgtttagccaagctggacccaccagcatgtctcttcaagctaaaaactggctgcctggaccttgctacagacagcagcgtctgtcaaagcaggcaaacgacaacaacaacagcaactttccctggactgcggctacaaagtatcatctaaatggtcgggactcgttggttaatccaggaccagctatggccagccacaaagacgatgaagaaaagtttttccccatgcatggaaccctgatatttggtaaacaaggaacaaatgctaacgacgcggatttggaacatgtcatgattacagatgaagaagaaatcaggaccaccaatcccgtggctacagagcagtacggaaacgtgtcaaataatttgcaaaactcaaatactggtccaactacagaaaatgtcaatcaccagggagcgttacctggtatggtgtggcaggatcgagacgtgtacctgcagggacccatttgggccaagattcctcacaccgacggacactttcacccttctccactgatgggaggttttggactcaaacacccgcctcctcaaatcatgatcaaaaacactcctgttccagccaatcctcctacaaacttcagcgcggcaaagtttgcttccttcatcacacagtattccacgggacaggtcagcgtggagatcgagtgggagctgcagaaggggaacagcaaacgctggaaccccgagatccagtacacttccaactacaacaaatctgttaatgtggactttactgtggacactaatggtgtgtattcagagcctcgccccattggcaccagatacctgactcgtaatctgtaa

SEQ ID NO: 4409 - DNA, 2208 bp, synthetic construct
  misc_feature 1..2208: note = source = /note="Description of Artificial Sequence: Synthetic polynucleotide"
  source 1..2208: mol_type = other DNA
atggctgccgatggttatcttccagattggctcgaggacactctctctgaaggaataagacagtggtggaagctcaaacctggcccaccaccaccaaagcccgcagagcggcatcaggacgacagcaggggtcttgtgcttcctgggtacaagtacctcggacccttcaacggactcgacaaaggagagccggtcaacgaggcagacgctgcggccctcgagcacgacaaggcctacgaccggcagctcgacagcggagacaacccgtacctcaagtacaaccacgccgacgcggagtttcaggagcgtcttaaagaagatacgtcttttgggggcaacctcggacgagcagtcttccaggcgaaaaagagggttcttgaacctctgggcctggttgaggaacctgttaagacggctccgggaaaaaagaggccggtagagcactctcctgcggagccagactcctcctcgggaaccggaaaagcgggccagcagcctgcaagaaagagattgaatttcggtcagactggagacgcagactccgtacctgacccccagcctctcggacagccaccagcagcccccacaagtttgggatctactacaatggctacaggcagtggcgcaccaatggcagacaataacgagggtgccgatggagtgggtaattcctcaggaaattggcattgcgattcccaatggctgggcgacagagtcatcaccaccagcacccgaacctgggccctgcccacctacaacaaccacctctacaagcaaatctccagccaatcaggagcatcgaacgacaaccactactttggctacagcaccccttgggggtattttgacttcaacagattccactgtcacttctccccacgtgactggcaaagactcatcaacaacaactggggattccgacccaagagactcaacttcaagctctttaacattcaagtcaaagaggtcacgcagaatgacggtacgacgacgattgccaataaccttaccagcacggttcaggtgtttactgactcggagtaccagctcccgtacgtcctcggctcggcgcatcaaggatgcctcccgccgtttccagcggacgtcttcatggtcccacagtatggatacctcaccctgaacaacgggagtcaggcggtaggacgctcttccttttactgcctggagtactttccttctcagatgctgcgtaccggaaacaactttaccttcagctacacctttgaggacgtgcctttccacagcagctacgctcacagccagagtttggaccggctgatgaatcctctgatcgaccagtatctgtattatctgaacaggacacaatcaaatagtggaactcttcagcagtctaggctactgtttagccaagctggacccaccagcatgtctcttcaagctaaaaactggctgcctggaccttgctacagacagcagcgtctgtcaaagcaggcaaacgacaacaacaacagcaactttccctggactgcggctacaaagtatcatctaaatggtcgggactcgttggttaatccaggaccagctatggccagccacaaagacgatgaagaaaagtttttccccatgcatggaaccctgatatttggtaaacaaggaacaaatgctaacgacgcggatttggaacatgtcatgattacagatgaagaagaaatcaggaccaccaatcccgtggctacagagcagtacggaaacgtgtcaaataatttgcaaaactcaaatactggtccaactacagaaaatgtcaatcaccagggagcgttacctggtatggtgtggcaggatcgagacgtgtacctgcagggacccatttgggccaagattcctcacaccgacggacactttcacccttctccactgatgggaggttttggactcaaacacccgcctcctcaaatcatgatcaaaaacactcctgttccagccaatcctcctacaaacttcagcgcggcaaagtttgcttccttcatcacacagtattccacgggacaggtcagcgtggagatcgagtgggggctgcagaaggagaacagcaaacgctggaaccccgagatccagtacacttccaactacaacaaatctgttaatgtggactttactgtggacactaatggtgtgtattcagagcctcgccccattggcaccagatacctgactcgtaatctgtaa

SEQ ID NO: 4410 - DNA, 2208 bp, synthetic construct
  misc_feature 1..2208: note = source = /note="Description of Artificial Sequence: Synthetic polynucleotide"
  source 1..2208: mol_type = other DNA
atggctgccgatggttatcttccagattggctcgaggacactctctctgaaggaataagacagtggtggaagctcaaacctggcccaccaccaccaaagcccgcagagcggcatcaggacgacagcaggggtcttgtgcttcctgggtacaagtacctcggacccttcaacggactcgacaaaggagagccggtcaacgaggcagacgctgcggccctcgagcacgacaaggcctacgaccggcagctcgacagcggagacaacccgtacctcaagtacaaccacgccgacgcggagtttcaggagcgtcttaaagaagatacgtcttttgggggcaacctcggacgagcagtcttccaggcgaaaaagagggttcttgaacctctgggcctggttgaggaacctgttaagacggctccgggaaaaaagaggccggtagagcactctcctgcggagccagactcctcctcgggaaccggaaaagcgggccagcagcctgcaagaaagagattgaatttcggtcagactggagacgcagactccgtacctgacccccagcctctcggacagccaccagcagcccccacaagtttgggatctactacaatggctacaggcagtggcgcaccaatggcagacaataacgagggtgccgatggagtgggtaattcctcaggaaattggcattgcgattcccaatggctgggcgacagagtcatcaccaccagcacccgaacctgggccctgcccacctacaacaaccacctctacaagcaaatctccagccaatcaggagcatcgaacgacaaccactactttggctacagcaccccttgggggtattttgacttcaacagattccactgtcacttctccccacgtgactggcaaagactcatcaacaacaactggggattccgacccaagagactcaacttcaagctctttaacattcaagtcaaagaggtcacgcagaatgacggtacgacgacgattgccaataaccttaccagcacggttcaggtgtttactgactcggagtaccagctcccgtacgtcctcggctcggcgcatcaaggatgcctcccgccgtttccagcggacgtcttcatggtcccacagtatggatacctcaccctgaacaacgggagtcaggcggtaggacgctcttccttttactgcctggagtactttccttctcagatgctgcgtaccggaaacaactttaccttcagctacacctttgaggacgtgcctttccacagcagctacgctcacagccagagtttggaccggctgatgaatcctctgatcgaccagtatctgtattatctgaacaggacacgatcaaatagtggaactcttcagcagtctaggctactgtttagccaagctggacccaccagcatgtctcttcaagctaaaaactggctgcctggaccttgctacagacagcagcgtctgtcaaagcaggcaaacgacaacaacaacagcaactttccctggactgcggctacaaagtatcatctaaatggtcgggactcgttggttaatccaggaccagctatggccagccacaaagacgatgaagaaaagtttttccccatgcatggaaccctgatatttggtaaacaaggaacaaatgctaacgacgcggatttggaacatgtcatgattacagatgaagaagaaatcaggaccaccaatcccgtggctacagagcagtacggaaacgtgtcaaataatttgcaaaactcaaatactggtccaactacagaaaatgtcaatcaccagggagcgttacctggtatggtgtggcaggatcgagacgtgtacctgcagggacccatttgggccaagattcctcacaccgacggacactttcacccttctccactgatgggaggttttggactcaaacacccgcctcctcaaatcatgatcaaaaacactcctgttccagccaatcctcctacaaacttcagcgcggcaaagtttgcttccttcatcacacagtattccacgggacaggtcagcgtggagatcgagtgggagctgcagaaggagaacagcaaacgctggaaccccgagatccagtacacttccaactacaacaaatctgttaatgtggactttactgtggacactaatggtgtgtattcagagcctcgccccattggcaccagatacctgactcgtaatctgtaa

SEQ ID NO: 4411 - DNA, 2208 bp, synthetic construct
  misc_feature 1..2208: note = source = /note="Description of Artificial Sequence: Synthetic polynucleotide"
  source 1..2208: mol_type = other DNA
atggctgccgatggttatcttccagattggctcgaggacactctctctgaaggaataagacagtggtggaagctcaaacctggcccaccaccaccaaagcccgcagagcggcatcaggacgacagcaggggtcttgtgcttcctgggtacaagtacctcggacccttcaacggactcgacaaaggagagccggtcaacgaggcagacgctgcggccctcgagcacgacaaggcctacgaccggcagctcgacagcggagacaacccgtacctcaagtacaaccacgccgacgcggagtttcaggagcgtcttaaagaagatacgtcttttgggggcaacctcggacgagcagtcttccaggcgaaaaagagggttcttgaacctctgggcctggttgaggaacctgttaagacggctccgggaaaaaagaggccggtagagcactctcctgcggagccagactcctcctcgggaaccggaaaagcgggccagcagcctgcaagaaagagattgaatttcggtcagactggagacgcagactccgtacctgacccccagcctctcggacagccaccagcagcccccacaagtttgggatctactacaatggctacaggcagtggcgcaccaatggcagacaataacgagggtgccgatggagtgggtaattcctcaggaaattggcattgcgattcccaatggctgggcgacagagtcatcaccaccagcacccgaacctgggccctgcccacctacaacaaccacctctacaagcaaatctccagccaatcaggagcatcgaacgacaaccactactttggctacagcaccccttgggggtattttgacttcaacagattccactgtcacttctccccacgtgactggcaaagactcatcaacaacaactggggattccgacccaagagactcaacttcaagctctttaacattcaagtcaaagaggtcacgcagaatgacggtacgacgacgattgccaataaccttaccagcacggttcaggtgtttactgactcggagtaccagctcccgtacgtcctcggctcggcgcatcaaggatgcctcccgccgtttccagcggacgtcttcatggtcccacagtatggatacctcaccctgaacaacgggagtcaggcggtaggacgctcttccttttactgcctggagtactttccttctcagatgctgcgtaccggaaacaactttaccttcagctacacctttgaggacgtgcctttccacagcagctacgctcacagccagagtttggaccggctgatgaatcctctgatcgaccagtatctgtattatctgaacaggacacaatcaaatagtggaactcttcagcagtctaggctactgtttagccaagctggacccaccagcatgtctcttcaagctaaaaactggctgcctggaccttgctacagacagcagcgtctgtcaaagcaggcaaacgacaacaacaacagcaactttccctggactgcggctacaaagtatcatctaaatggtcgggactcgttggttaatccaggaccagctatggccagccacaaagacgatgaagaaaagtttttccccatgcatggaaccctgatatttggtaaacaaggaacaaatgctaacgacgcggatttggaacatgtcatgattacagatgaagaagaaatcaggaccaccaatcccgtggctacagagcagtacggaaacgtgtcaaataatttgcaaaactcaaatactggtccaactacagaaaatgtcaatcaccagggagcgttacctggtatggtgtggcaggatcgaggcgtgtacctgcagggacccatttgggccaagattcctcacaccgacggacactttcacccttctccactgatgggaggttttggactcaaacacccgcctcctcaaatcatgatcaaaaacactcctgttccagccaatcctcctacaaacttcagcgcggcaaagtttgcttccttcatcacacagtattccacgggacaggtcagcgtggagatcgagtgggagctgcagaaggagaacagcaaacgctggaaccccgagatccagtacacttccaactacaacaaatctgttaatgtggactttactgtggacactaatggtgtgtattcagagcctcgccccattggcaccagatacctgactcgtaatctgtaa

SEQ ID NO: 4412 - DNA, 2208 bp, synthetic construct
  misc_feature 1..2208: note = source = /note="Description of Artificial Sequence: Synthetic polynucleotide"
  source 1..2208: mol_type = other DNA
atggctgccgatggttatcttccagattggctcgaggacactctctctgaaggaataagacagtggtggaagctcaaacctggcccaccaccaccaaagcccgcagagcggcatcaggacgacagcaggggtcttgtgcttcctgggtacaagtacctcggacccttcaacggactcgacaaaggagagccggtcaacgaggcagacgctgcggccctcgagcacgacaaggcctacgaccggcagctcgacagcggagacaacccgtacctcaagtacaaccacgccgacgcggagtttcaggagcgtcttaaagaagatacgtcttttgggggcaacctcggacgagcagtcttccaggcgaaaaagagggttcttgaacctctgggcctggttgaggaacctgttaagacggctccgggaaaaaagaggccggtagagcactctcctgcggagccagactcctcctcgggaaccggaaaagcgggccagcagcctgcaagaaagagattgaatttcggtcagactggagacgcagactccgtacctgacccccagcctctcggacagccaccagcagcccccacaagtttgggatctactacaatggctacaggcagtggcgcaccaatggcagacaataacgagggtgccgatggagtgggtaattcctcaggaaattggcattgcgattcccaatggctgggcgacagagtcatcaccaccagcacccgaacctgggccctgcccacctacaacaaccacctctacaagcaaatctccagccaatcaggagcatcgaacgacaaccactactttggctacagcaccccttgggggtattttgacttcaacagattccactgtcacttctccccacgtgactggcaaagactcatcaacaacaactggggattccgacccaagagactcaacttcaagctctttaacattcaagtcaaagaggtcacgcagaatggcggtacgacgacgattgccaataaccttaccagcacggttcaggtgtttactgactcggagtaccagctcccgtacgtcctcggctcggcgcatcaaggatgcctcccgccgtttccagcggacgtcttcatggtcccacagtatggatacctcaccctgaacaacgggagtcaggcggtaggacgctcttccttttactgcctggagtactttccttctcagatgctgcgtaccggaaacaactttaccttcagctacacctttgaggacgtgcctttccacagcagctacgctcacagccagagtttggaccggctgatgaatcctctgatcgaccagtatctgtattatctgaacaggacacaatcaaatagtggaactcttcagcagtctaggctactgtttagccaagctggacccaccagcatgtctcttcaagctaaaaactggctgcctggaccttgctacagacagcagcgtctgtcaaagcaggcaaacgacaacaacaacagcaactttccctggactgcggctacaaagtatcatctaaatggtcgggactcgttggttaatccaggaccagctatggccagccacaaagacgatgaagaaaagtttttccccatgcatggaaccctgatatttggtaaacaaggaacaaatgctaacgacgcggatttggaacatgtcatgattacagatgaagaagaaatcaggaccaccaatcccgtggctacagagcagtacggaaacgtgtcaaataatttgcaaaactcaaatactggtccaactacagaaaatgtcaatcaccagggagcgttacctggtatggtgtggcaggatcgagacgtgtacctgcagggacccatttgggccaagattcctcacaccgacggacactttcacccttctccactgatgggaggttttggactcaaacacccgcctcctcaaatcatgatcaaaaacactcctgttccagccaatcctcctacaaacttcagcgcggcaaagtttgcttccttcatcacacagtattccacgggacaggtcagcgtggagatcgagtgggagctgcagaaggagaacagcaaacgctggaaccccgagatccagtacacttccaactacaacaaatctgttaatgtggactttactgtggacactaatggtgtgtattcagagcctcgccccattggcaccagatacctgactcgtaatctgtaa

SEQ ID NO: 4413 - DNA, 2208 bp, synthetic construct
  misc_feature 1..2208: note = source = /note="Description of Artificial Sequence: Synthetic polynucleotide"
  source 1..2208: mol_type = other DNA
atggctgccgatggttatcttccagattggctcgaggacactctctctgaaggaataagacagtggtggaagctcaaacctggcccaccaccaccaaagcccgcagagcggcatcaggacgacagcaggggtcttgtgcttcctgggtacaagtacctcggacccttcaacggactcgacaaaggagagccggtcaacgaggcagacgctgcggccctcgagcacgacaaggcctacgaccggcagctcgacagcggagacaacccgtacctcaagtacaaccacgccgacgcggagtttcaggagcgtcttaaagaagatacgtcttttgggggcaacctcggacgagcagtcttccaggcgaaaaagagggttcttgaacctctgggcctggttgaggaacctgttaagacggctccgggaaaaaagaggccggtagagcactctcctgcggagccagactcctcctcgggaaccggaaaagcgggccagcagcctgcaagaaagagattgaatttcggtcagactggagacgcagactccgtacctgacccccagcctctcggacagccaccagcagcccccacaagtttgggatctactacaatggctacaggcagtggcgcaccaatggcagacaataacgagggtgccgatggagtgggtaattcctcaggaaattggcattgcgattcccaatggctgggcgacagagtcatcaccaccagcacccgaacctgggccctgcccacctacaacaaccacctctacaagcaaatctccagccaatcaggagcatcgaacgacaaccactactttggctacagcaccccttgggggtattttgacttcaacagattccactgtcacttctccccacgtgactggcaaagactcatcaacaacaactggggattccgacccaagagactcaacttcaagctctttaacattcaagtcaaagaggtcacgcagaatgacggtacgacgacgattgccaataaccttaccagcacggttcaggtgtttactgactcggagtaccagctcccgtacgtcctcggctcggcgcatcaaggatgcctcccgccgtttccagcggacgtcttcatggtcccacagtatggatacctcaccctgaacaacgggagtcaggcggtaggacgctcttccttttactgcctggagtactttccttctcagatgctgcgtaccggaaacaactttaccttcagctacacctttgaggacgtgcctttccacagcagctacgctcacagccagagtttggaccggctgatgaatcctctgatcgaccagtatctgtattatctgaacaggacacaatcaaatagtggaactcttcagcagtctaggctactgtttagccaagctggacccaccagcatgtctcttcaagctaaaaactggctgcctggaccttgctacagacagcagcgtctgtcaaagcaggcaaacgacaacaacaacagcaactttccctggactgcggctacaaagtatcatctaaatggtcgggactcgttggttaatccaggaccagctatggccagccacaaagacgatgaagaaaagtttttccccatgcatggaaccctgatatttggtaaacaaggaacaaatgctaacgacgcggatttggaacatgtcatgattacagatgaagaagaaatcaggaccaccaatcccgtggctacagagcagtacggaaacgtgtcaaataatttgcaaaactcaaatactggtccaactacagaaaatgtcaatcaccagggagcgttacctggtatggtgtggcaggatcgagacgtgtacctgcagggacccatttgggccaagattcctcacaccgacggacactttcacccttctccactgatgggaggttttggactcaaacacccgcctcctcaaatcatgatcaaaaacactcctgttccagccaatcctcctacaaacttcagcgcggcaaagtttgcttccttcatcacacagtattccacgggacaggtcagcgtggagatcgagtgggagctgcggaaggagaacagcaaacgctggaaccccgagatccagtacacttccaactacaacaaatctgttaatgtggactttactgtggacactaatggcgtgtattcagagcctcgccccattggcaccagatacctgactcgtaatctgtaa

SEQ ID NO: 4414 - DNA, 2208 bp, synthetic construct
  misc_feature 1..2208: note = source = /note="Description of Artificial Sequence: Synthetic polynucleotide"
  source 1..2208: mol_type = other DNA
atggctgccgatggttatcttccagattggctcgaggacactctctctgaaggaataagacagtggtggaagctcaaacctggcccaccaccaccaaagcccgcagagcggcatcaggacgacagcaggggtcttgtgcttcctgggtacaagtacctcggacccttcaacggactcgacaaaggagagccggtcaacgaggcagacgctgcggccctcgagcacgacaaggcctacgaccggcagctcgacagcggagacaacccgtacctcaagtacaaccacgccgacgcggagtttcaggagcgtcttaaagaagatacgtcttttgggggcaacctcggacgagcagtcttccaggcgaaaaggagggttcttgaacctctgggcctggttgaggaacctgttaagacggctccgggaaaaaagaggccggtagagcactctcctgcggagccagactcctcctcgggaaccggaaaagcgggccagcagcctgcaagaaagagattgaatttcggtcagactggagacgcagactccgtacctgacccccagcctctcggacagccaccagcagcccccacaagtttgggatctactacaatggctacaggcagtggcgcaccaatggcagacaataacgagggtgccgatggagtgggtaattcctcaggaaattggcattgcgattcccaatggctgggcgacagagtcatcaccaccagcacccgaacctgggccctgcccacctacaacaaccacctctacaagcaaatctccagccaatcaggagcatcgaacgacaaccactactttggctacagcaccccttgggggtattttgacttcaacagattccactgtcacttctccccacgtgactggcaaagactcatcaacaacaactggggattccgacccaagagactcaacttcaagctctttaacattcaagtcaaagaggtcacgcagaatgacggtacgacgacgattgccaataaccttaccagcacggttcaggtgtttactgactcggagtaccagctcccgtacgtcctcggctcggcgcatcaaggatgcctcccgccgtttccagcggacgtcttcatggtcccacagtatggatacctcaccctgaacaacgggagtcaggcggtaggacgctcttccttttactgcctggagtactttccttctcagatgctgcgtaccggaaacaactttaccttcagctacacctttgaggacgtgcctttccacagcagctacgctcacagccagagtttggaccggctgatgaatcctctgatcgaccagtatctgtattatctgaacaggacacaatcaaatagtggaactcttcagcagtctaggctactgtttagccaagctggacccaccagcatgtctcttcaagctaaaaactggctgcctggaccttgctacagacagcagcgtctgtcaaagcaggcaaacgacaacaacaacagcaactttccctggactgcggctacaaagtatcatctaaatggtcgggactcgttggttaatccaggaccagctatggccagccacaaagacgatgaagaaaagtttttccccatgcatggaaccctgatatttggtaaacaaggaacaaatgctaacgacgcggatttggaacatgtcatgattacagatgaagaagaaatcaggaccaccaatcccgtggctacagagcagtacggaaacgtgtcaaataatttgcaaaactcaaatactggtccaactacagaaaatgtcaatcaccagggagcgttacctggtatggtgtggcaggatcgagacgtgtacctgcagggacccatttgggccaagattcctcacaccgacggacactttcacccttctccactgatgggaggttttggactcaaacacccgcctcctcaaatcatgatcaaaaacactcctgttccagccaatcctcctacaaacttcagcgcggcaaagtttgcttccttcatcacacagtattccacgggacaggtcagcgtggagatcgagtgggagctgcagaaggagaacagcaaacgctggaaccccgagatccagtacacttccaactacaacaaatctgttaatgtggactttactgtggacactaatggtgtgtattcagagcctcgccccattggcaccagatacctgactcgtaatctgtaa

SEQ ID NO: 4415 - DNA, 2208 bp, synthetic construct
  misc_feature 1..2208: note = source = /note="Description of Artificial Sequence: Synthetic polynucleotide"
  source 1..2208: mol_type = other DNA
atggctgccgatggttatcttccagattggctcgaggacactctctctgaaggaataagacagtggtggaagctcaaacctggcccaccaccaccaaagcccgcagagcggcatcaggacgacagcaggggtcttgtgcttcctgggtacaagtacctcggacccttcaacggactcgacaaaggagagccggtcaacgaggcagacgctgcggccctcgagcacgacaaggcctacgaccggcagctcgacagcggagacaacccgtacctcaagtacaaccacgccgacgcggagcttcaggagcgtcttaaagaagatacgtcttttgggggcaacctcggacgagcagtcttccaggcgaaaaagagggttcttgaacctctgggcctggttgaggaacctgttaagacggctccgggaaaaaagaggccggtagagcactctcctgcggagccagactcctcctcgggaaccggaaaagcgggccagcagcctgcaagaaagagattgaatttcggtcagactggagacgcagactccgtacctgacccccagcctctcggacagccaccagcagcccccacaagtttgggatctactacaatggctacaggcagtggcgcaccaatggcagacaataacgagggtgccgatggagtgggtaattcctcaggaaattggcattgcgattcccaatggctgggcgacagagtcatcaccaccagcacccgaacctgggccctgcccacctacaacaaccacctctacaagcaaatctccagccaatcaggagcatcgaacgacaaccactactttggctacagcaccccttgggggtattttgacttcaacagattccactgtcacttctccccacgtgactggcaaagactcatcaacaacaactggggattccgacccaagagactcaacttcaagctctttaacattcaagtcaaagaggtcacgcagaatgacggtacgacgacgattgccaataaccttaccagcacggttcaggtgtttactgactcggagtaccagctcccgtacgtcctcggctcggcgcatcaaggatgcctcccgccgtttccagcggacgtcttcatggtcccacagtatggatacctcaccctgaacaacgggagtcaggcggtaggacgctcttccttttactgcctggagtactttccttctcagatgctgcgtaccggaaacaactttaccttcagctacacctttgaggacgtgcctttccacagcagctacgctcacagccagagtttggaccggctgatgaatcctctgatcgaccagtatctgtattatctgaacaggacacaatcaaatagtggaactcttcagcagtctaggctactgtttagccaagctggacccaccagcatgtctcttcaagctaaaaactggctgcctggaccttgctacagacagcagcgtctgtcaaagcaggcaaacgacaacaacaacagcaactttccctggactgcggctacaaagtatcatctaaatggtcgggactcgttggttaatccaggaccagctatggccagccacaaagacgatgaagaaaagtttttccccatgcatggaaccctgatatttggtaaacaaggaacaaatgctaacgacgcggatttggaacatgtcatgattacagatgaagaagaaatcaggaccaccaatcccgtggctacagagcagtacggaaacgtgtcaaataatttgcaaaactcaaatactggtccaactacagaaaatgtcaatcaccagggagcgttacctggtatggtgtggcaggatcgagacgtgtacctgcagggacccatttgggccaagattcctcacaccgacggacactttcacccttctccactgatgggaggttttggactcaaacacccgcctcctcaaatcatgatcaaaaacactcctgttccagccaatcctcctacaaacttcagcgcggcaaagtttgcttccttcatcacacagtattccacgggacaggtcagcgtggagatcgagtgggagctgcagaaggagaacagcaaacgctggaaccccgagatccagtacacttccaactacaacaaatctgttaatgtggactttactgtggacactaatggtgtgtattcagagcctcgccccattggcaccagatacctgactcgtaatctgtaa

SEQ ID NO: 4416 - DNA, 2208 bp, synthetic construct
  misc_feature 1..2208: note = source = /note="Description of Artificial Sequence: Synthetic polynucleotide"
  source 1..2208: mol_type = other DNA
atggctgccgatggttatcttccagattggctcgaggacactctctctgaaggaataagacagtggtggaagctcaaacctggcccaccaccaccaaagcccgcagagcggcatcaggacgacagcaggggtcttgtgcttcctgggtacaagtacctcggacccttcaacggactcgacaaaggagagccggtcaacgaggcagacgctgcggccctcgagcacgacaaggcctacgaccggcagctcgacagcggagacaacccgtacctcaagtacaaccacgccgacgcggagtttcaggagcgtcttaaagaagatacgtcttttgggggcaacctcggacgagcagtcttccaggcgaaaaagagggttcttgaacctctgggcctggttgaggaacctgttaagacggctccgggaaaaaagaggccggtagagcactctcctgcggagccagactcctcctcgggaaccggaaaagcgggccagcagcctgcaagaaagagattgaatttcggtcagactggagacgcagactccgtacctgacccccagcctctcggacagccaccagcagcccccacaagtttgggatctactacaatggctacaggcagtggcgcaccaatggcagacaataacgagggtgccgatggagtgggtaattcctcaggaaattggcattgcgattcccaatggctgggcggcagagtcatcaccaccagcacccgaacctgggccctgcccacctacaacaaccacctctacaagcaaatctccagccaatcaggagcatcgaacgacaaccactactttggctacagcaccccttgggggtattttgacttcaacagattccactgtcacttctccccacgtgactggcaaagactcatcaacaacaactggggattccgacccaagagactcaacttcaagctctttaacattcaagtcaaagaggtcacgcagaatgacggtacgacgacgattgccaataaccttaccagcacggttcaggtgtttactgactcggagtaccagctcccgtacgtcctcggctcggcgcatcaaggatgcctcccgccgtttccagcggacgtcttcatggtcccacagtatggatacctcaccctgaacaacgggagtcaggcggtaggacgctcttccttttactgcctggagtactttccttctcagatgctgcgtaccggaaacaactttaccttcagctacacctttgaggacgtgcctttccacagcagctacgctcacagccagagtttggaccggctgatgaatcctctgatcgaccagtatctgtattatctgaacaggacacaatcaaatagtggaactcttcagcagtctaggctactgtttagccaagctggacccaccagcatgtctcttcaagctaaaaactggctgcctggaccttgctacagacagcagcgtctgtcaaagcaggcaaacgacaacaacaacagcaactttccctggactgcggctacaaagtatcatctaaatggtcgggactcgttggttaatccaggaccagctatggccagccacaaagacgatgaagaaaagtttttccccatgcatggaaccctgatatttggtaaacaaggaacaaatgctaacgacgcggatttggaacatgtcatgattacagatgaagaagaaatcaggaccaccaatcccgtggctacagagcagtacggaaacgtgtcaaataatttgcaaaactcaaatactggtccaactacagaaaatgtcaatcaccagggagcgttacctggtatggtgtggcaggatcgagacgtgtacctgcagggacccatttgggccaagattcctcacaccgacggacactttcacccttctccactgatgggaggttttggactcaaacacccgcctcctcaaatcatgatcaaaaacactcctgttccagccaatcctcctacaaacttcagcgcggcaaagtttgcttccttcatcacacagtattccacgggacaggtcagcgtggagatcgagtgggagctgcagaaggagaacagcaaacgctggaaccccgagatccagtacacttccaactacaacaaatctgttaatgtggactttactgtggacactaatggtgtgtattcagagcctcgccccattggcaccagatacctgactcgtaatctgtaa

SEQ ID NO: 4417 - DNA, 2208 bp, synthetic construct
  misc_feature 1..2208: note = source = /note="Description of Artificial Sequence: Synthetic polynucleotide"
  source 1..2208: mol_type = other DNA
atggctgccgatggttatcttccagattggctcgaggacactctctctgaaggaataagacagtggtggaagctcaaacctggcccaccaccaccaaagcccgcagagcggcatcaggacgacagcaggggtcttgtgcttcctgggtacaagtacctcggacccttcaacggactcgacaaaggagagccggtcaacgaggcagacgctgcggccctcgagcacgacaaggcctacgaccggcagctcgacagcggagacaacccgtacctcaagtacaaccacgccgacgcggagtttcaggagcgtcttaaagaagatacgtcttttgggggcaacctcggacgagcagtcttccaggcgaaaaagagggttcttgaacctctgggcctggttgaggaacctgttaagacggctccgggaaaaaagaggccggtagagcactctcctgcggagccagactcctcctcgggaaccggaaaagcgggccagcagcctgcaagaaagagattgaatttcggtcagactggagacgcagactccgtacctgacccccagcctctcggacagccaccagcagcccccacaagtttgggatctactacaatggctacaggcagtggcgcaccaatggcagacaataacgagggtgccgatggagtgggtaattcctcaggaaattggcattgcgattcccaatggctgggcgacagagtcatcaccaccagcacccgaacctgggccctgcccacctacaacaaccacctctacaagcaaatctccagccaatcaggagcatcgaacgacaaccactactttggctacagcaccccttgggggtattttgacttcaacagattccactgtcacttctccccacgtgactggcaaagactcatcaacaacaactggggattccgacccaagagactcaacttcaagctctttaacattcaagtcaaagaggtcacgcagaatgacggtacgacgacgattgccaataaccttaccagcacggttcaggtgtttactgactcggagtaccagctcccgtacgtcctcggctcggcgcatcaaggatgcctcccgccgcttccagcggacgtcttcatggtcccacagtatggatacctcaccctgaacaacgggagtcaggcggtaggacgctcttccttttactgcctggagtactttccttctcagatgctgcgtaccggaaacaactttaccttcagctacacctttgaggacgtgcctttccacagcagctacgctcacagccagagtttggaccggctgatgaatcctctgatcgaccagtatctgtattatctgaacaggacacaatcaaatagtggaactcttcagcagtctaggctactgtttagccaagctggacccaccagcatgtctcttcaagctaaaaactggctgcctggaccttgctacagacagcagcgtctgtcaaagcaggcaaacgacaacaacaacagcaactttccctggactgcggctacaaagtatcatctaaatggtcgggactcgttggttaatccaggaccagctatggccagccacaaagacgatgaagaaaagtttttccccatgcatggaaccctgatatttggtaaacaaggaacaaatgctaacgacgcggatttggaacatgtcatgattacagatgaagaagaaatcaggaccaccaatcccgtggctacagagcagtacggaaacgtgtcaaataatttgcaaaactcaaatactggtccaactacagaaaatgtcaatcaccagggagcgttacctggtatggtgtggcaggatcgagacgtgtacctgcagggacccatttgggccaagattcctcacaccgacggacactttcacccttctccactgatgggaggttttggactcaaacacccgcctcctcaaatcatgatcaaaaacactcctgttccagccaatcctcctacaaacttcagcgcggcaaagtttgcttccttcatcacacagtattccacgggacaggtcagcgtggagatcgagtgggagctgcagaaggagaacagcaaacgctggaaccccgagatccagtacacttccaactacaacaaatctgttaatgtggactttactgtggacactaatggtgtgtattcagagcctcgccccattggcaccagatacctgactcgtaatctgtaa

SEQ ID NO: 4418 - DNA, 2208 bp, synthetic construct
  misc_feature 1..2208: note = source = /note="Description of Artificial Sequence: Synthetic polynucleotide"
  source 1..2208: mol_type = other DNA
atggctgccgatggttatcttccagattggctcgaggacactctctctgaaggaataagacagtggtggaagctcaaacctggcccaccaccaccaaagcccgcagagcggcatcaggacgacagcaggggtcttgtgcttcctgggtacaagtacctcggacccttcaacggactcgacaaaggagagccggtcaacgaggcagacgctgcggccctcgagcacgacaaggcctacgaccggcagctcgacagcggagacaacccgtacctcaagtacaaccacgccgacgcggagtttcaggagcgtcttaaagaagatacgtcttttgggggcaacctcggacgagcagtcttccaggcgaaaaagagggttcttgaacctctgggcctggttgaggaacctgttaagacggctccgggaaaaaagaggccggtagagcactctcctgcggagccagactcctcctcgggaaccggaaaagcgggccagcagcctgcaagaaagagattgaatttcggtcagactggagacgcagactccgtacctgacccccagcctctcggacagccaccagcagcccccacaagtttgggatctactgcaatggctacaggcagtggcgcaccaatggcagacaataacgagggtgccgatggagtgggtaattcctcaggaaattggcattgcgattcccaatggctgggcgacagagtcatcaccaccagcacccgaacctgggccctgcccacctacaacaaccacctctacaagcaaatctccagccaatcaggagcatcgaacgacaaccactactttggctacagcaccccttgggggtattttgacttcaacagattccactgtcacttctccccacgtgactggcaaagactcatcaacaacaactggggattccgacccaagagactcaacttcaagctctttaacattcaagtcaaagaggtcacgcagaatgacggtacgacgacgattgccaataaccttaccagcacggttcaggtgtttactgactcggagtaccagctcccgtacgtcctcggctcggcgcatcaaggatgcctcccgccgtttccagcggacgtcttcatggtcccacagtatggatacctcaccctgaacaacgggagtcaggcggtaggacgctcttccttttactgcctggagtactttccttctcagatgctgcgtaccggaaacaactttaccttcagctacacctttgaggacgtgcctttccacagcagctacgctcacagccagagtttggaccggctgatgaatcctctgatcgaccagtatctgtattatctgaacaggacacaatcaaatagtggaactcttcagcagtctaggctactgtttagccaagctggacccaccagcatgtctcttcaagctaaaaactggctgcctggaccttgctacagacagcagcgtctgtcaaagcaggcaaacgacaacaacaacagcaactttccctggactgcggctacaaagtatcatctaaatggtcgggactcgttggttaatccaggaccagctatggccagccacaaagacgatgaagaaaagtttttccccatgcatggaaccctgatatttggtaaacaaggaacaaatgctaacgacgcggatttggaacatgtcatgattacagatgaagaagaaatcaggaccaccaatcccgtggctacagagcagtacggaaacgtgtcaaataatttgcaaaactcaaatactggtccaactacagaaaatgtcaatcaccagggagcgttacctggtatggtgtggcaggatcgagacgtgtacctgcagggacccatttgggccaagattcctcacaccgacggacactttcacccttctccactgatgggaggttttggactcaaacacccgcctcctcaaatcatgatcaaaaacactcctgttccagccaatcctcctacaaacttcagcgcggcaaagtttgcttccttcatcacacagtattccacgggacaggtcagcgtggagatcgagtgggagctgcagaaggagaacagcaaacgctggaaccccgagatccagtacacttccaactacaacaaatctgttaatgtggactttactgtggacactaatggtgtgtattcagagcctcgccccattggcaccagatacctgactcgtaatctgtaa

SEQ ID NO: 4419 - DNA, 2208 bp, synthetic construct
  misc_feature 1..2208: note = source = /note="Description of Artificial Sequence: Synthetic polynucleotide"
  source 1..2208: mol_type = other DNA
atggctgccgatggttatcttccagattggctcgaggacactctctctgaaggaataagacagtggtggaagctcaaacctggcccaccaccaccaaagcccgcagagcggcatcaggacgacagcaggggtcttgtgcttcctgggtacaagtacctcggacccttcaacggactcgacaaaggagagccggtcaacgaggcagacgctgcggccctcgagcacgacaaggcctacgaccggcagctcgacagcggagacaacccgtacctcaagtacaaccacgccgacgcggagtttcaggagcgtcttaaagaagatacgtcttttgggggcaacctcggacgagcagtcttccaggcgaaaaagagggttcttgaacctctgggcctggttgaggaacctgttaagacggctccgggaaaaaagaggccggtagagcactctcctgcggagccagactcctcctcgggaaccggaaaagcgggccagcagcctgcaagaaagagattgaatttcggtcagactggagacgcagactccgtacctgacccccagcctctcggacagccaccagcagcccccacaagtttgggatctactacaatggctacaggcagtggcgcaccaatggcagacaataacgagggtgccgatggagtgggtaattcctcaggaaattggcattgcgattcccaatggctgggcgacagagtcatcaccaccagcacccgaacctgggccctgcccacctacaacaaccacctctacaagcaaatctccagccaatcaggagcatcgaacgacaaccactactttggctacagcaccccttgggggtattttgacttcaacagattccactgtcacttctccccacgtgactggcaaagactcatcaacaacaactggggattccgacccaagagactcaacttcaagctctttaacattcaagtcaaagaggtcacgcagaatgacggtacgacgacgattgccaataaccttaccagcacggttcaggtgtttactgactcggagtaccagctcccgtacgtcctcggctcggcgcatcaaggatgcctcccgccgtttccagcggacgtcttcatggtcccacagtatggatacctcaccctgaacaacgggagtcaggcggtaggacgctcttccttttactgcctggagtactttccttctcagatgctgcgtaccggaaacaactttaccttcagctacacctttgaggacgtgcctttccacagcagctacgctcacagccagagtttggaccggctgatgaatcctctgatcgaccagtatctgtattatctgaacaggacacaatcaaatagtggaactcttcagcagtctaggctactgtttagccaagctggacccaccagcatgtctcttcaagctaaaaactggctgcctggaccttgctacagacagcagcgtctgtcaaggcaggcaaacgacaacaacaacagcaactttccctggactgcggctacaaagtatcatctaaatggtcgggactcgttggttaatccaggaccagctatggccagccacaaagacgatgaagaaaagtttttccccatgcatggaaccctgatatttggtaaacaaggaacaaatgctaacgacgcggatttggaacatgtcatgattacagatgaagaagaaatcaggaccaccaatcccgtggctacagagcagtacggaaacgtgtcaaataatttgcaaaactcaaatactggtccaactacagaaaatgtcaatcaccagggagcgttacctggtatggtgtggcaggatcgagacgtgtacctgcagggacccatttgggccaagattcctcacaccgacggacactttcacccttctccactgatgggaggttttggactcaaacacccgcctcctcaaatcatgatcaaaaacactcctgttccagccaatcctcctacaaacttcagcgcggcaaagtttgcttccttcatcacacagtattccacgggacaggtcagcgtggagatcgagtgggagctgcagaaggagaacagcaaacgctggaaccccgagatccagtacacttccaactacaacaaatctgttaatgtggactttactgtggacactaatggtgtgtattcagagcctcgccccattggcaccagatacctgactcgtaatctgtaa

SEQ ID NO: 4420 - DNA, 2208 bp, synthetic construct
  misc_feature 1..2208: note = source = /note="Description of Artificial Sequence: Synthetic polynucleotide"
  source 1..2208: mol_type = other DNA
atggctgccgatggttatcttccagattggctcgaggacactctctctgaaggaataagacagtggtggaagctcaaacctggcccaccaccaccaaagcccgcagagcggcatcaggacgacagcaggggtcttgtgcttcctgggtacaagtacctcggacccttcaacggactcgacaaaggagagccggtcaacgaggcagacgctgcggccctcgagcacgacaaggcctacgaccggcagctcggcagcggagacaacccgtacctcaagtacaaccacgccgacgcggagtttcaggagcgtcttaaagaagatacgtcttttgggggcaacctcggacgagcagtcttccaggcgaaaaagagggttcttgaacctctgggcctggttgaggaacctgttaagacggctccgggaaaaaagaggccggtagagcactctcctgcggagccagactcctcctcgggaaccggaaaagcgggccagcagcctgcaagaaagagattgaatttcggtcagactggagacgcagactccgtacctgacccccagcctctcggacagccaccagcagcccccacaagtttgggatctactacaatggctacaggcagtggcgcaccaatggcagacaataacgagggtgccgatggagtgggtaattcctcaggaaattggcattgcgattcccaatggctgggcgacagagtcatcaccaccagcacccgaacctgggccctgcccacctacaacaaccacctctacaagcaaatctccagccaatcaggagcatcgaacgacaaccactactttggctacagcaccccttgggggtattttgacttcaacagattccactgtcacttctccccacgtgactggcaaagactcatcaacaacaactggggattccgacccaagagactcaacttcaagctctttaacattcaagtcaaagaggtcacgcagaatgacggtacgacgacgattgccaataaccttaccagcacggttcaggtgtttactgactcggagtaccagctcccgtacgtcctcggctcggcgcatcaaggatgcctcccgccgtttccagcggacgtcttcatggtcccacagtatggatacctcaccctgaacaacgggagtcaggcggtaggacgctcttccttttactgcctggagtactttccttctcagatgctgcgtaccggaaacaactttaccttcagctacacctttgaggacgtgcctttccacagcagctacgctcacagccagagtttggaccggctgatgaatcctctgatcgaccagtatctgtattatctgaacaggacacaatcaaatagtggaactcttcagcagtctaggctactgtttagccaagctggacccaccagcatgtctcttcaagctaaaaactggctgcctggaccttgctacagacagcagcgtctgtcaaagcaggcaaacgacaacaacaacagcaactttccctggactgcggctacaaagtatcatctaaatggtcgggactcgttggttaatccaggaccagctatggccagccacaaagacgatgaagaaaagtttttccccatgcatggaaccctgatatttggtaaacaaggaacaaatgctaacgacgcggatttggaacatgtcatgattacagatgaagaagaaatcaggaccaccaatcccgtggctacagagcagtacggaaacgtgtcaaataatttgcaaaactcaaatactggtccaactacagaaaatgtcaatcaccagggagcgttacctggtatggtgtggcaggatcgagacgtgtacctgcagggacccatttgggccaagattcctcacaccgacggacactttcacccttctccactgatgggaggttttggactcaaacacccgcctcctcaaatcatgatcaaaaacactcctgttccagccaatcctcctacaaacttcagcgcggcaaagtttgcttccttcatcacacagtattccacgggacaggtcagcgtggagatcgagtgggagctgcagaaggagaacagcaaacgctggaaccccgagatccagtacacttccaactacaacaaatctgttaatgtggactttactgtggacactaatggtgtgtattcagagcctcgccccattggcaccagatacctgactcgtaatctgtaa

SEQ ID NO: 4421 - DNA, 2208 bp, synthetic construct
  misc_feature 1..2208: note = source = /note="Description of Artificial Sequence: Synthetic polynucleotide"
  source 1..2208: mol_type = other DNA
atggctgccgatggttatcttccagattggctcgaggacactctctctgaaggaataagacagtggtggaagctcaaacctggcccaccaccaccaaagcccgcagagcggcatcaggacgacagcaggggtcttgtgcttcctgggtacaagtacctcggacccttcaacggactcgacaaaggagagccggtcaacgaggcagacgctgcggccctcgagcacgacaaggcctacgaccggcagctcgacagcggagacaacccgtacctcaagtacaaccacgccgacgcggagtttcaggagcgtcttaaagaagatacgtcttttgggggcaacctcggacgagcagtcttccaggcgaaaaagagggttcttgaacctctgggcctggttgaggaacctgttaagacggctccgggaaaaaagaggccggtagagcactctcctgcggagccagactcctcctcgggaaccggaaaagcgggccagcagcctgcaagaaagagattgaatttcggtcagactggagacgcagactccgtacctgacccccagcctctcggacagccaccagcagcccccacaagtttgggatctactacaatggctacaggcagtggcgcaccaatggcagacaataacgagggtgccgatggagtgggtaattcctcaggaaattggcattgcgattcccaatggctgggcgacagagtcatcaccaccagcacccgaacctgggccctgcccacctacaacaaccacctctacaagcaaatctccagccaatcaggagcatcgaacgacaaccactactttggctacagcaccccttgggggtattttgacttcaacagattccactgtcacttctccccacgtgactggcaaagactcatcaacaacaactggggattccgacccaagagactcaacttcaagctctttaacattcaagtcaaagaggtcacgcagaatgacggtacgacgacgattgccaataaccttaccagcacggttcaggtgtttactgactcggagtaccagctcccgtacgtcctcggctcggcgcatcaaggatgcctcccgccgtttccagcggacgtcttcatggtcccacagtatggatacctcaccctgaacaacgggagtcaggcggtaggacgctcttccttttactgcctggagtactttccttctcagatgctgcgtaccggaaacaactttaccttcagctacacctttgaggacgtgcctttccacagcagctacgctcacagccagagtttggaccggctgatgaatcctctgatcgaccagtatctgcattatctgaacaggacacaatcaaatagtggaactcttcagcagtctaggctactgtttagccaagctggacccaccagcatgtctcttcaagctaaaaactggctgcctggaccttgctacagacagcagcgtctgtcaaagcaggcaaacgacaacaacaacagcaactttccctggactgcggctacaaagtatcatctaaatggtcgggactcgttggttaatccaggaccagctatggccagccacaaagacgatgaagaaaagtttttccccatgcatggaaccctgatatttggtaaacaaggaacaaatgctaacgacgcggatttggaacatgtcatgattacagatgaagaagaaatcaggaccaccaatcccgtggctacagagcagtacggaaacgtgtcaaataatttgcaaaactcaaatactggtccaactacagaaaatgtcaatcaccagggagcgttacctggtatggtgtggcaggatcgagacgtgtacctgcagggacccatttgggccaagattcctcacaccgacggacactttcacccttctccactgatgggaggttttggactcaaacacccgcctcctcaaatcatgatcaaaaacactcctgttccagccaatcctcctacaaacttcagcgcggcaaagtttgcttccttcatcacacagtattccacgggacaggtcagcgtggagatcgagtgggagctgcagaaggagaacagcaaacgctggaaccccgagatccagtacacttccaactacaacaaatctgttaatgtggactttactgtggacactaatggtgtgtattcagagcctcgccccattggcaccagatacctgactcgtaatctgtaa

SEQ ID NO: 4422 - DNA, 2208 bp, synthetic construct
  misc_feature 1..2208: note = source = /note="Description of Artificial Sequence: Synthetic polynucleotide"
  source 1..2208: mol_type = other DNA
atggctgccgatggttatcttccagattggctcgaggacactctctctgaaggaataagacagtggtggaagctcaaacctggcccaccaccaccaaagcccgcagagcggcatcaggacgacagcaggggtcttgtgcttcctgggtacaagtacctcggacccttcaacggactcgacaaaggagagccggtcaacgaggcagacgctgcggccctcgagcacgacaaggcctacgaccggcagctcgacagcggagacaacccgtacctcaagtacaaccacgccgacgcggagtttcaggagcgtcttaaagaagatacgtcttttgggggcaacctcggacgagcagtcttccaggcgaaaaagagggttcttgaacctctgggcctggttgaggaacctgttaagacggctccgggaaaaaagaggccggtagagcaccctcctgcggagccagactcctcctcgggaaccggaaaagcgggccagcagcctgcaagaaagagattgaatttcggtcagactggagacgcagactccgtacctgacccccagcctctcggacagccaccagcagcccccacaagtttgggatctactacaatggctacaggcagtggcgcaccaatggcagacaataacgagggtgccgatggagtgggtaattcctcaggaaattggcattgcgattcccaatggctgggcgacagagtcatcaccaccagcacccgaacctgggccctgcccacctacaacaaccacctctacaagcaaatctccagccaatcaggagcatcgaacgacaaccactactttggctacagcaccccttgggggtattttgacttcaacagattccactgtcacttctccccacgtgactggcaaagactcatcaacaacaactggggattccgacccaagagactcaacttcaagctctttaacattcaagtcaaagaggtcacgcagaatgacggtacgacgacgattgccaataaccttaccagcacggttcaggtgtttactgactcggagtaccagctcccgtacgtcctcggctcggcgcatcaaggatgcctcccgccgtttccagcggacgtcttcatggtcccacagtatggatacctcaccctgaacaacgggagtcaggcggtaggacgctcttccttttactgcctggagtactttccttctcagatgctgcgtaccggaaacaactttaccttcagctacacctttgaggacgtgcctttccacagcagctacgctcacagccagagtttggaccggctgatgaatcctctgatcgaccagtatctgtattatctgaacaggacacaatcaaatagtggaactcttcagcagtctaggctactgtttagccaagctggacccaccagcatgtctcttcaagctaaaaactggctgcctggaccttgctacagacagcagcgtctgtcaaagcaggcaaacgacaacaacaacagcaactttccctggactgcggctacaaagtatcatctaaatggtcgggactcgttggttaatccaggaccagctatggccagccacaaagacgatgaagaaaagtttttccccatgcatggaaccctgatatttggtaaacaaggaacaaatgctaacgacgcggatttggaacatgtcatgattacagatgaagaagaaatcaggaccaccaatcccgtggctacagagcagtacggaaacgtgtcaaataatttgcaaaactcaaatactggtccaactacagaaaatgtcaatcaccagggagcgttacctggtatggtgtggcaggatcgagacgtgtacctgcagggacccatttgggccaagattcctcacaccgacggacactttcacccttctccactgatgggaggttttggactcaaacacccgcctcctcaaatcatgatcaaaaacactcctgttccagccaatcctcctacaaacttcagcgcggcaaagtttgcttccttcatcacacagtattccacgggacaggtcagcgtggagatcgagtgggagctgcagaaggagaacagcaaacgctggaaccccgagatccagtacacttccaactacaacaaatctgttaatgtggactttactgtggacactaatggtgtgtattcagagcctcgccccattggcaccagatacctgactcgtaatctgtaa

SEQ ID NO: 4423 - DNA, 2208 bp, synthetic construct
  misc_feature 1..2208: note = source = /note="Description of Artificial Sequence: Synthetic polynucleotide"
  source 1..2208: mol_type = other DNA
atggctgccgatggttatcttccagattggctcgaggacactctctctgaaggaataagacagtggtggaagctcaaacctggcccaccaccaccaaagcccgcagagcggcatcaggacgacagcaggggtcttgtgcttcctgggtacaagtacctcggacccttcaacggactcgacaaaggagagccggtcaacgaggcagacgctgcggccctcgagcacgacaaggcctacgaccggcagctcgacagcggagacaacccgtacctcaagtacaaccacgccgacgcggagtttcaggagcgtcttaaagaagatacgtcttttgggggcaacctcggacgagcagtcttccaggcgaaaaagagggttcttgaacctctgggcctggttgaggaacctgttaagacggctccgggaaaaaagaggccggtagagcactctcctgcggagccagactcctcctcgggaaccggaaaagcgggccagcagcctgcaagaaagagattgaatttcggtcagactggagacgcagactccgtacctgacccccagcctctcggacagccaccagcagcccccacaagtttgggatctactacaatggctacaggcagtggcgcaccaatggcagacaataacgagggtgccgatggagtgggtaattcctcaggaaattggcattgcgattcccaatggctgggcgacagagtcatcaccaccagcacccgaacctgggccctgcccacctacaacaaccacctctacaagcaaatctccagccaatcaggagcatcgaacgacaaccactactttggctacagcaccccttgggggtattttgacttcaacagattccactgtcacttctccccacgtgactggcaaagactcatcaacaacaactggggattccgacccaagagactcaacttcaagctctttaacattcaagtcaaagaggtcacgcagaatgacggtacgacgacgattgccaataaccttaccagcacggttcaggtgtttactgactcggagtaccagctcccgtacgtcctcggctcggcgcatcaaggatgcctcccgccgtttccagcggacgtcttcatggtcccacagtatggatacctcaccctgaacaacgggagtcaggcggtaggacgctcttccttttactgcctggagtactttccttctcagatgctgcgtaccggaaacaactttaccttcagctacacctttgaggacgtgcctttccacagcagctacgctcacagccagagtttggaccggctgatgaatcctctgatcgaccagtatctgtattatctgaacaggacacaatcaaatagtggaactcttcagcagtctaggctactgtttagccaagctggacccaccagcatgtctcttcaagctaaaaactggctgcctggaccttgctacagacagcagcgtctgtcaaagcaggcaaacgacaacaacaacagcaactttccctggactgcggctacaaagtatcatctaaatggtcgggactcgttggttaatccaggaccagctatggccagccacaaagacgatgaagaaaagtttttccccatgcatggaaccctgatatttggtaaacaaggaacaaatgctaacgacgcggatttggaacatgtcatgattacagatgaagaagaaatcaggaccaccaatcccgtggctacagagcagtacggaaacgtgtcaaataatttgcaaaactcaaatactggtccaactacagaaaatgtcaatcaccagggagcgttacctggtatggtgtggcaggatcgagacgtgtacctgcagggacccatttgggccaagattcctcacaccgacggacactttcacccttctccactgatgggaggttttggactcaaacacccgcctcctcaaatcatgatcaaaaacactcctgttccagccaatcctcctacaaacttcagcgcggcaaagtttgcttccttcatcacacagtattccacgggacaggtcagcgtggagatcgagtgggagctgcagaaggagaacagcaaacgctggaaccccgagatccagtacacttccaactacaacaaatctgttaatgtggactttactgcggacactaatggtgtgtattcagagcctcgccccattggcaccagatacctgactcgtaatctgtaa

SEQ ID NO: 4424 - DNA, 2208 bp, synthetic construct
  misc_feature 1..2208: note = source = /note="Description of Artificial Sequence: Synthetic polynucleotide"
  source 1..2208: mol_type = other DNA
atggctgccgatggttatcttccagattggctcgaggacactctctctgaaggaataagacagtggtggaagctcaaacctggcccaccaccaccaaagcccgcagagcggcatcaggacgacagcaggggtcttgtgcttcctgggtacaagtacctcggacccttcaacggactcgacaaaggagagccggtcaacgaggcagacgctgcggccctcgagcacgacaaggcctacgaccggcagctcgacagcggagacaacccgtacctcaagtacaaccacgccgacgcggagtttcaggagcgtcttaaagaagatacgtcttttgggggcaacctcggacgagcagtcttccaggcgaaaaagagggttcttgaacctctgggcctggttgaggaacctgttaagacggctccgggaaaaaagaggccggtagagcactctcctgcggagccagactcctcctcgggaaccggaaaagcgggccagcagcctgcaagaaagagattgaatttcggtcagactggagacgcagactccgtacctgacccccagcctctcggacagccaccagcagcccccacaagtttgggatctactacaatggctacaggcagtggcgcaccaatggcagacaataacgagggtgccgatggagtgggtaattcctcaggaaattggcattgcgattcccaatggctgggcgacagagtcatcaccaccagcacccgaacctgggccctgcccacctacaacaaccacctctacaagcaaatctccagccaatcaggagcatcgaacgacaaccactactttggctacagcaccccttgggggtattttgacttcaacagattccactgtcacttctccccacgtgactggcaaagactcatcaacaacaactggggattccgacccaagagactcaacttcaagctctttaacattcaagtcaaagaggtcacgcagaatgacggtacgacgacgattgccaataaccttaccagcacggttcaggtgtttactgactcggagtaccagctcccgtacgtcctcggctcggcgcatcaaggatgcctcccgccgtttccagcggacgtcttcatggtcccacagtatggatacctcaccctgaacaacgggagtcaggcggtaggacgctcttccttttactgcctggagtactttccttctcagatgctgcgtaccggaaacaactttaccttcagctacacctttgaggacgtgcctttccacagcagctacgctcacagccagagtttggaccggctgatgaatcctctgatcgaccagtatctgtattatctgaacaggacacaatcaaatagtggaactcttcggcagtctaggctactgtttagccaagctggacccaccagcatgtctcttcaagctaaaaactggctgcctggaccttgctacagacagcagcgtctgtcaaagcaggcaaacgacaacaacaacagcaactttccctggactgcggctacaaagtatcatctaaatggtcgggactcgttggttaatccaggaccagctatggccagccacaaagacgatgaagaaaagtttttccccatgcatggaaccctgatatttggtaaacaaggaacaaatgctaacgacgcggatttggaacatgtcatgattacagatgaagaagaaatcaggaccaccaatcccgtggctacagagcagtacggaaacgtgtcaaataatttgcaaaactcaaatactggtccaactacagaaaatgtcaatcaccagggagcgttacctggtatggtgtggcaggatcgagacgtgtacctgcagggacccatttgggccaagattcctcacaccgacggacactttcacccttctccactgatgggaggttttggactcaaacacccgcctcctcaaatcatgatcaaaaacactcctgttccagccaatcctcctacaaacttcagcgcggcaaagtttgcttccttcatcacacagtattccacgggacaggtcagcgtggagatcgagtgggagctgcagaaggagaacagcaaacgctggaaccccgagatccagtacacttccaactacaacaaatctgttaatgtggactttactgtggacactaatggtgtgtattcagagcctcgccccattggcaccagatacctgactcgtaatctgtaa

SEQ ID NO: 4425 - DNA, 2208 bp, synthetic construct
  misc_feature 1..2208: note = source = /note="Description of Artificial Sequence: Synthetic polynucleotide"
  source 1..2208: mol_type = other DNA
atggctgccgatggttatcttccagattggctcgaggacactctctctgaaggaataagacagtggtggaagctcaaacctggcccaccaccaccaaagcccgcagagcggcatcaggacgacagcaggggtcttgtgcttcctgggtacaagtacctcggacccttcaacggactcgacaaaggagagccggtcaacgaggcagacgctgcggccctcgagcacgacaaggcctacgaccggcagctcgacagcggagacaacccgtacctcaagtacaaccacgccgacgcggagtttcaggagcgtcttaaagaagatacgtcttttgggggcaacctcggacgagcagtcttccaggcgaaaaagagggttcttgaacctctgggcctggttgaggaacctgttaagacggctccgggaaaaaagaggccggtagagcactctcctgcggagccagactcctcctcgggaaccggaaaagcgggccagcagcctgcaagaaagagattgaatttcggtcagactggagacgcagactccgtacctgacccccagcctctcggacagccaccagcagcccccacaagtttgggatctactacaatggctacaggcagtggcgcaccaatggcagacaataacgagggtgccgatggagtgggtaattcctcaggaaattggcattgcgattcccaatggctgggcgacagagtcatcaccaccagcacccgaacctgggccctgcccacctacaacaaccacctctacaagcaaatctccagccaatcaggagcatcgaacgacaaccactactttggctacagcaccccttgggggtattttgacttcaacagattccactgtcacttctccccacgtgactggcaaagactcatcaacaacaactggggattccgacccaagagactcaacttcaagctctttaacattcaagtcaaagaggtcacgcagaatgacggtacgacgacgattgccaataaccttaccagcacggttcaggtgtttactgactcggagtaccagctcccgtacgtcctcggctcggcgcatcaaggatgcctcccgccgtttccagcggacgtcttcatggtcccacagtatggatacctcaccctgaacaacgggagtcaggcggtaggacgctcttccttttactgcctggagtactttccttctcagatgctgcgtaccggaaacaactttaccttcagctacacctttgaggacgtgcctttccacagcagctacgctcacagccagagtttggaccggctgatgaatcctctgatcgaccagtatctgtattatctgaacaggacacaatcaaatagtggaactcttcagcagtctaggctactgtttagccaagctggacccaccagcatgtctcttcaagctaaaaactggctgcctggaccttgctacagacagcagcgtctgtcaaagcaggcaaacgacaacaacaacagcaactttccctggactgcggctacaaagtatcatctaaatggtcgggactcgttggttaatccaggaccagctatggccagccacaaagacgatgaagaaaagtttttccccatgcatggaaccctgatatttggtaaacaaggaacaaatgctaacgacgcggatttggaacatgtcatgattacagatgaagaagaaatcaggaccaccaatcccgtggctacagagcagtacggaaacgtgtcaaataatttgcaaaactcaaatactggtccaactacagaaaatgtcaatcaccagggagcgttacctggtatggtgtggcaggatcgagacgtgtacctgcagggacccatttgggccaagattcctcacaccgacggacactttcacccttctccactgatgggaggttttggactcaaacacccgcctcctcaaatcatgatcaaaaacactcctgttccagccaatcctcctacaaacttcagcgcggcaaagtttgcttccttcatcacacagtattccacgggacgggtcagcgtggagatcgagtgggagctgcagaaggagaacagcaaacgctggaaccccgagatccagtacacttccaactacaacaaatctgttaatgtggactttactgtggacactaatggtgtgtattcagagcctcgccccattggcaccagatacctgactcgtaatctgtaa

SEQ ID NO: 4426 - DNA, 2208 bp, synthetic construct
  misc_feature 1..2208: note = source = /note="Description of Artificial Sequence: Synthetic polynucleotide"
  source 1..2208: mol_type = other DNA
atggctgccgatggttatcttccagattggctcgaggacactctctctgaaggaataagacagtggtggaagctcaaacctggcccaccaccaccaaagcccgcagagcggcatcaggacgacagcaggggtcttgtgcttcctgggtacaagtacctcggacccttcaacggactcgacaaaggagagccggtcaacgaggcagacgctgcggccctcgagcacgacaaggcctacgaccggcagctcgacagcggagacaacccgtacctcaagtacaaccacgccgacgcggagtttcaggagcgtcttaaagaagatacgtcttttgggggcaacctcggacgagcagtcttccgggcgaaaaagagggttcttgaacctctgggcctggttgaggaacctgttaagacggctccgggaaaaaagaggccggtagagcactctcctgcggagccagactcctcctcgggaaccggaaaagcgggccagcagcctgcaagaaagagattgaatttcggtcagactggagacgcagactccgtacctgacccccagcctctcggacagccaccagcagcccccacaagtttgggatctactacaatggctacaggcagtggcgcaccaatggcagacaataacgagggtgccgatggagtgggtaattcctcaggaaattggcattgcgattcccaatggctgggcgacagagtcatcaccaccagcacccgaacctgggccctgcccacctacaacaaccacctctacaagcaaatctccagccaatcaggagcatcgaacgacaaccactactttggctacagcaccccttgggggtattttgacttcaacagattccactgtcacttctccccacgtgactggcaaagactcatcaacaacaactggggattccgacccaagagactcaacttcaagctctttaacattcaagtcaaagaggtcacgcagaatgacggtacgacgacgattgccaataaccttaccagcacggttcaggtgtttactgactcggagtaccagctcccgtacgtcctcggctcggcgcatcaaggatgcctcccgccgtttccagcggacgtcttcatggtcccacagtatggatacctcaccctgaacaacgggagtcaggcggtaggacgctcttccttttactgcctggagtactttccttctcagatgctgcgtaccggaaacaactttaccttcagctacacctttgaggacgtgcctttccacagcagctacgctcacagccagagtttggaccggctgatgaatcctctgatcgaccagtatctgtattatctgaacaggacacaatcaaatagtggaactcttcagcagtctaggctactgtttagccaagctggacccaccagcatgtctcttcaagctaaaaactggctgcctggaccttgctacagacagcagcgtctgtcaaagcaggcaaacgacaacaacaacagcaactttccctggactgcggctacaaagtatcatctaaatggtcgggactcgttggttaatccaggaccagctatggccagccacaaagacgatgaagaaaagtttttccccatgcatggaaccctgatatttggtaaacaaggaacaaatgctaacgacgcggatttggaacatgtcatgattacagatgaagaagaaatcaggaccaccaatcccgtggctacagagcagtacggaaacgtgtcaaataatttgcaaaactcaaatactggtccaactacagaaaatgtcaatcaccagggagcgttacctggtatggtgtggcaggatcgagacgtgtacctgcagggacccatttgggccaagattcctcacaccgacggacactttcacccttctccactgatgggaggttttggactcaaacacccgcctcctcaaatcatgatcaaaaacactcctgttccagccaatcctcctacaaacttcagcgcggcaaagtttgcttccttcatcacacagtattccacgggacaggtcagcgtggagatcgagtgggagctgcagaaggagaacagcaaacgctggaaccccgagatccagtacacttccaactacaacaaatctgttaatgtggactttactgtggacactaatggtgtgtattcagagcctcgccccattggcaccagatacctgactcgtaatctgtaa

SEQ ID NO: 4427 - DNA, 2208 bp, synthetic construct
  misc_feature 1..2208: note = source = /note="Description of Artificial Sequence: Synthetic polynucleotide"
  source 1..2208: mol_type = other DNA
atggctgccgatggttatcttccagattggctcgaggacactctctctgaaggaataagacagtggtggaagcccaaacctggcccaccaccaccaaagcccgcagagcggcatcaggacgacagcaggggtcttgtgcttcctgggtacaagtacctcggacccttcaacggactcgacaaaggagagccggtcaacgaggcagacgctgcggccctcgagcacgacaaggcctacgaccggcagctcgacagcggagacaacccgtacctcaagtacaaccacgccgacgcggagtttcaggagcgtcttaaagaagatacgtcttttgggggcaacctcggacgagcagtcttccaggcgaaaaagagggttcttgaacctctgggcctggttgaggaacctgttaagacggctccgggaaaaaagaggccggtagagcactctcctgcggagccagactcctcctcgggaaccggaaaagcgggccagcagcctgcaagaaagagattgaatttcggtcagactggagacgcagactccgtacctgacccccagcctctcggacagccaccagcagcccccacaagtttgggatctactacaatggctacaggcagtggcgcaccaatggcagacaataacgagggtgccgatggagtgggtaattcctcaggaaattggcattgcgattcccaatggctgggcgacagagtcatcaccaccagcacccgaacctgggccctgcccacctacaacaaccacctctacaagcaaatctccagccaatcaggagcatcgaacgacaaccactactttggctacagcaccccttgggggtattttgacttcaacagattccactgtcacttctccccacgtgactggcaaagactcatcaacaacaactggggattccgacccaagagactcaacttcaagctctttaacattcaagtcaaagaggtcacgcagaatgacggtacgacgacgattgccaataaccttaccagcacggttcaggtgtttactgactcggagtaccagctcccgtacgtcctcggctcggcgcatcaaggatgcctcccgccgtttccagcggacgtcttcatggtcccacagtatggatacctcaccctgaacaacgggagtcaggcggtaggacgctcttccttttactgcctggagtactttccttctcagatgctgcgtaccggaaacaactttaccttcagctacacctttgaggacgtgcctttccacagcagctacgctcacagccagagtttggaccggctgatgaatcctctgatcgaccagtatctgtattatctgaacaggacacaatcaaatagtggaactcttcagcagtctaggctactgtttagccaagctggacccaccagcatgtctcttcaagctaaaaactggctgcctggaccttgctacagacagcagcgtctgtcaaagcaggcaaacgacaacaacaacagcaactttccctggactgcggctacaaagtatcatctaaatggtcgggactcgttggttaatccaggaccagctatggccagccacaaagacgatgaagaaaagtttttccccatgcatggaaccctgatatttggtaaacaaggaacaaatgctaacgacgcggatttggaacatgtcatgattacagatgaagaagaaatcaggaccaccaatcccgtggctacagagcagtacggaaacgtgtcaaataatttgcaaaactcaaatactggtccaactacagaaaatgtcaatcaccagggagcgttacctggtatggtgtggcaggatcgagacgtgtacctgcagggacccatttgggccaagattcctcacaccgacggacactttcacccttctccactgatgggaggttttggactcaaacacccgcctcctcaaatcatgatcaaaaacactcctgttccagccaatcctcctacaaacttcagcgcggcaaagtttgcttccttcatcacacagtattccacgggacaggtcagcgtggagatcgagtgggagctgcagaaggagaacagcaaacgctggaaccccgagatccagtacacttccaactacaacaaatctgttaatgtggactttactgtggacactaatggtgtgtattcagagcctcgccccattggcaccagatacctgactcgtaatctgtaa

SEQ ID NO: 4428 - DNA, 2208 bp, synthetic construct
  misc_feature 1..2208: note = source = /note="Description of Artificial Sequence: Synthetic polynucleotide"
  source 1..2208: mol_type = other DNA
atggctgccgatggttatcttccagattggctcgaggacactctctctgaaggaataagacagtggtggaagctcaaacctggcccaccaccaccaaagcccgcagagcggcatcaggacgacagcaggggtcttgtgcttcctgggtacaagtacctcggacccttcaacggactcgacaaaggagagccggtcaacgaggcagacgctgcggccctcgagcacgacaaggcctacgaccggcagctcgacagcggagacaacccgtacctcaagtacaaccacgccgacgcggagtttcaggagcgtcttaaagaagatacgtcttttgggggcaacctcggacgagcagtcttccaggcgaaaaagagggttcttgaacctctgggcctggttgaggaacctgttaagacggctccgggaaaaaagaggccggtagagcactctcctgcggagccagactcctcctcgggaaccggaaaagcgggccagcagcctgcaagaaagagattgaatttcggtcagactggagacgcagactccgtacctgacccccagcctctcggacagccaccagcagcccccacaagtttgggatctactacaatggctacaggcagtggcgcaccaatggcagacaataacgagggtgccgatggagtgggtaattcctcaggaaattggcattgcgattcccaatggctgggcgacagagtcatcaccaccagcacccgaacctgggccctgcccacctacaacaaccacctctacaagcaaatctccagccaatcaggagcatcgaacgacaaccactactttggctacagcaccccttgggggtattttgacttcaacagattccactgtcacttctccccacgtgactggcaaagactcatcaacaacaactggggattccgacccaagagactcaacttcaagctctttaacattcaagtcaaagaggtcacgcagaatgacggtacgacgacgattgccaataaccttaccagcacggttcaggtgtttactgactcggagtaccagctcccgtacgtcctcggctcggcgcatcaaggatgcctcccgccgtttccagcggacgtcttcatggtcccacagtatggatacctcaccctgaacaacgggagtcaggcggtaggacgctcttccttttactgcctggagtactttccttctcagatgctgcgtaccggaaacaactttaccttcagctacacctttgaggacgtgcctttccacagcagctacgctcacagccagagtttggaccggctgatgaatcctctgatcgaccagtatctgtattatctgaacaggacacaatcaaatagtggaactcttcagcagtctaggctactgtttagccaagctggacccaccagcatgtctcttcaagctaaaaactggctgcctggaccttgctacagacagcagcgtctgtcaaagcaggcaaacgacaacaacaacagcaactttccctggactgcggctacaaagtatcatctaaatggtcgggactcgttggttaatccaggaccagctatggccagccacaaagacgatgaagaaaagtttttccccatgcatggaaccctgatatttggtaaacaaggaacaaatgctaacgacgcggatttggaacatgtcatgattacagatgaagaagaaatcaggaccaccaatcccgtggctacagagcagtacggaaacgtgtcaaataatttgcaaaactcaaatactggtccaactacagaaaatgccaatcaccagggagcgttacctggtatggtgtggcaggatcgagacgtgtacctgcagggacccatttgggccaagattcctcacaccgacggacactttcacccttctccactgatgggaggttttggactcaaacacccgcctcctcaaatcatgatcaaaaacactcctgttccagccaatcctcctacaaacttcagcgcggcaaagtttgcttccttcatcacacagtattccacgggacaggtcagcgtggagatcgagtgggagctgcagaaggagaacagcaaacgctggaaccccgagatccagtacacttccaactacaacaaatctgttaatgtggactttactgtggacactaatggtgtgtattcagagcctcgccccattggcaccagatacctgactcgtaatctgtaa

SEQ ID NO: 4429 - DNA, 2208 bp, synthetic construct
  misc_feature 1..2208: note = source = /note="Description of Artificial Sequence: Synthetic polynucleotide"
  source 1..2208: mol_type = other DNA
atggctgccgatggttatcttccagattggctcgaggacactccctctgaaggaataagacagtggtggaagctcaaacctggcccaccaccaccaaagcccgcagagcggcatcaggacgacagcaggggtcttgtgcttcctgggtacaagtacctcggacccttcaacggactcgacaaaggagagccggtcaacgaggcagacgctgcggccctcgagcacgacaaggcctacgaccggcagctcgacagcggagacaacccgtacctcaagtacaaccacgccgacgcggagtttcaggagcgtcttaaagaagatacgtcttttgggggcaacctcggacgagcagtcttccaggcgaaaaagagggttcttgaacctctgggcctggttgaggaacctgttaagacggctccgggaaaaaagaggccggtagagcactctcctgcggagccagactcctcctcgggaaccggaaaagcgggccagcagcctgcaagaaagagattgaatttcggtcagactggagacgcagactccgtacctgacccccagcctctcggacagccaccagcagcccccacaagtttgggatctactacaatggctacaggcagtggcgcaccaatggcagacaataacgagggtgccgatggagtgggtaattcctcaggaaattggcattgcgattcccaatggctgggcgacagagtcatcaccaccagcacccgaacctgggccctgcccacctacaacaaccacctctacaagcaaatctccagccaatcaggagcatcgaacgacaaccactactttggctacagcaccccttgggggtattttgacttcaacagattccactgtcacttctccccacgtgactggcaaagactcatcaacaacaactggggattccgacccaagagactcaacttcaagctctttaacattcaagtcaaagaggtcacgcagaatgacggtacgacgacgattgccaataaccttaccagcacggttcaggtgtttactgactcggagtaccagctcccgtacgtcctcggctcggcgcatcaaggatgcctcccgccgtttccagcggacgtcttcatggtcccacagtatggatacctcaccctgaacaacgggagtcaggcggtaggacgctcttccttttactgcctggagtactttccttctcagatgctgcgtaccggaaacaactttaccttcagctacacctttgaggacgtgcctttccacagcagctacgctcacagccagagtttggaccggctgatgaatcctctgatcgaccagtatctgtattatctgaacaggacacaatcaaatagtggaactcttcagcagtctaggctactgtttagccaagctggacccaccagcatgtctcttcaagctaaaaactggctgcctggaccttgctacagacagcagcgtctgtcaaagcaggcaaacgacaacaacaacagcaactttccctggactgcggctacaaagtatcatctaaatggtcgggactcgttggttaatccaggaccagctatggccagccacaaagacgatgaagaaaagtttttccccatgcatggaaccctgatatttggtaaacaaggaacaaatgctaacgacgcggatttggaacatgtcatgattacagatgaagaagaaatcaggaccaccaatcccgtggctacagagcagtacggaaacgtgtcaaataatttgcaaaactcaaatactggtccaactacagaaaatgtcaatcaccagggagcgttacctggtatggtgtggcaggatcgagacgtgtacctgcagggacccatttgggccaagattcctcacaccgacggacactttcacccttctccactgatgggaggttttggactcaaacacccgcctcctcaaatcatgatcaaaaacactcctgttccagccaatcctcctacaaacttcagcgcggcaaagtttgcttccttcatcacacagtattccacgggacaggtcagcgtggagatcgagtgggagctgcagaaggagaacagcaaacgctggaaccccgagatccagtacacttccaactacaacaaatctgttaatgtggactttactgtggacactaatggtgtgtattcagagcctcgccccattggcaccagatacctgactcgtaatctgtaa

SEQ ID NO: 4430 - DNA, 2208 bp, synthetic construct
  misc_feature 1..2208: note = source = /note="Description of Artificial Sequence: Synthetic polynucleotide"
  source 1..2208: mol_type = other DNA
atggctgccgatggttatcttccagattggctcgaggacactctctctgaaggaataagacagtggtggaagctcaaacctggcccaccaccaccaaagcccgcagagcggcatcaggacgacagcaggggtcttgtgcttcctgggtacaagtacctcggacccttcaacggactcgacaaaggagagccggtcaacgaggcagacgctgcggccctcgagcacgacaaggcctacgaccggcagctcgacagcggagacaacccgtacctcaagtacaaccacgccgacgcggagtttcaggagcgtcttaaagaagatacgtcttttgggggcaacctcggacgagcagtcttccaggcgaaaaagagggttcttgaacctctgggcctggttgaggaacctgttaagacggctccgggaaaaaagaggccggtagagcactctcctgcggagccagactcctcctcgggaaccggaaaagcgggccagcagcctgcaagaaagagattgaatttcggtcagactggagacgcagactccgtacctgacccccagcctctcggacagccaccagcagcccccacaagtttgggatctactacaatggctacaggcagtggcgcaccaatggcagacaataacgagggtgccgatggagtgggtaattcctcaggaaattggcattgcgattcccaatggctgggcgacagagtcatcaccaccagcacccgaacctgggccctgcccacctacaacaaccacctctacaagcaaatctccagccaatcaggagcatcgaacgacaaccactactttggctacagcaccccttgggggtattttgacttcaacagattccactgtcacttctccccacgtgactggcaaagactcatcaacaacaactggggattccgacccaagagactcaacttcaggctctttaacattcaagtcaaagaggtcacgcagaatgacggtacgacgacgattgccaataaccttaccagcacggttcaggtgtttactgactcggagtaccagctcccgtacgtcctcggctcggcgcatcaaggatgcctcccgccgtttccagcggacgtcttcatggtcccacagtatggatacctcaccctgaacaacgggagtcaggcggtaggacgctcttccttttactgcctggagtactttccttctcagatgctgcgtaccggaaacaactttaccttcagctacacctttgaggacgtgcctttccacagcagctacgctcacagccagagtttggaccggctgatgaatcctctgatcgaccagtatctgtattatctgaacaggacacaatcaaatagtggaactcttcagcagtctaggctactgtttagccaagctggacccaccagcatgtctcttcaagctaaaaactggctgcctggaccttgctacagacagcagcgtctgtcaaagcaggcaaacgacaacaacaacagcaactttccctggactgcggctacaaagtatcatctaaatggtcgggactcgttggttaatccaggaccagctatggccagccacaaagacgatgaagaaaagtttttccccatgcatggaaccctgatatttggtaaacaaggaacaaatgctaacgacgcggatttggaacatgtcatgattacagatgaagaagaaatcaggaccaccaatcccgtggctacagagcagtacggaaacgtgtcaaataatttgcaaaactcaaatactggtccaactacagaaaatgtcaatcaccagggagcgttacctggtatggtgtggcaggatcgagacgtgtacctgcagggacccatttgggccaagattcctcacaccgacggacactttcacccttctccactgatgggaggttttggactcaaacacccgcctcctcaaatcatgatcaaaaacactcctgttccagccaatcctcctacaaacttcagcgcggcaaagtttgcttccttcatcacacagtattccacgggacaggtcagcgtggagatcgagtgggagctgcagaaggagaacagcaaacgctggaaccccgagatccagtacacttccaactacaacaaatctgttaatgtggactttactgtggacactaatggtgtgtattcagagcctcgccccattggcaccagatacctgactcgtaatctgtaa

SEQ ID NO: 4431 - DNA, 2208 bp, synthetic construct
  misc_feature 1..2208: note = source = /note="Description of Artificial Sequence: Synthetic polynucleotide"
  source 1..2208: mol_type = other DNA
atggctgccgatggttatcttccagattggctcgaggacactctctctgaaggaataagacagtggtggaagctcaaacctggcccaccaccaccaaagcccgcagagcggcatcaggacgacagcaggggtcttgtgcttcctgggtacaagtacctcggacccttcaacggactcgacaaaggagagccggtcaacgaggcagacgctgcggccctcgagcacgacaaggcctacgaccggcagctcgacagcggagacaacccgtacctcaagtacaaccacgccgacgcggagtttcaggagcgtcttaaagaagatacgtcttttgggggcaacctcggacgagcagtcttccaggcgaaaaagagggttcttgaacctctgggcctggttgaggaacctgttaagacggctccgggaaaaaagaggccggtagagcactctcctgcggagccagactcctcctcgggaaccggaaaagcgggccagcagcctgcaagaaagagattgaatttcggtcaggctggagacgcagactccgtacctgacccccagcctctcggacagccaccagcagcccccacaagtttgggatctactacaatggctacaggcagtggcgcaccaatggcagacaataacgagggtgccgatggagtgggtaattcctcaggaaattggcattgcgattcccaatggctgggcgacagagtcatcaccaccagcacccgaacctgggccctgcccacctacaacaaccacctctacaagcaaatctccagccaatcaggagcatcgaacgacaaccactactttggctacagcaccccttgggggtattttgacttcaacagattccactgtcacttctccccacgtgactggcaaagactcatcaacaacaactggggattccgacccaagagactcaacttcaagctctttaacattcaagtcaaagaggtcacgcagaatgacggtacgacgacgattgccaataaccttaccagcacggttcaggtgtttactgactcggagtaccagctcccgtacgtcctcggctcggcgcatcaaggatgcctcccgccgtttccagcggacgtcttcatggtcccacagtatggatacctcaccctgaacaacgggagtcaggcggtaggacgctcttccttttactgcctggagtactttccttctcagatgctgcgtaccggaaacaactttaccttcagctacacctttgaggacgtgcctttccacagcagctacgctcacagccagagtttggaccggctgatgaatcctctgatcgaccagtatctgtattatctgaacaggacacaatcaaatagtggaactcttcagcagtctaggctactgtttagccaagctggacccaccagcatgtctcttcaagctaaaaactggctgcctggaccttgctacagacagcagcgtctgtcaaagcaggcaaacgacaacaacaacagcaactttccctggactgcggctacaaagtatcatctaaatggtcgggactcgttggttaatccaggaccagctatggccagccacaaagacgatgaagaaaagtttttccccatgcatggaaccctgatatttggtaaacaaggaacaaatgctaacgacgcggatttggaacatgtcatgattacagatgaagaagaaatcaggaccaccaatcccgtggctacagagcagtacggaaacgtgtcaaataatttgcaaaactcaaatactggtccaactacagaaaatgtcaatcaccagggagcgttacctggtatggtgtggcaggatcgagacgtgtacctgcagggacccatttgggccaagattcctcacaccgacggacactttcacccttctccactgatgggaggttttggactcaaacacccgcctcctcaaatcatgatcaaaaacactcctgttccagccaatcctcctacaaacttcagcgcggcaaagtttgcttccttcatcacacagtattccacgggacaggtcagcgtggagatcgagtgggagctgcagaaggagaacagcaaacgctggaaccccgagatccagtacacttccaactacaacaaatctgttaatgtggactttactgtggacactaatggtgtgtattcagagcctcgccccattggcaccagatacctgactcgtaatctgtaa

SEQ ID NO: 4432 - DNA, 2208 bp, synthetic construct
  misc_feature 1..2208: note = source = /note="Description of Artificial Sequence: Synthetic polynucleotide"
  source 1..2208: mol_type = other DNA
atggctgccgatggttatcttccagattggctcgaggacactctctctgaaggaataagacagtggtggaagctcaaacctggcccaccaccaccaaagcccgcagagcggcatcaggacgacagcaggggtcttgtgcttcctgggtacaagtacctcggacccttcaacggactcgacaaaggagagccggtcaacgaggcagacgctgcggccctcgagcacgacaaggcctacgaccggcagctcgacagcggagacaacccgtacctcaagtacaaccacgccgacgcggagtttcaggagcgtcttaaagaagatacgtcttttgggggcaacctcggacgagcagtcttccaggcgaaaaagagggttcttgaacctctgggcctggttgaggaacctgttaagacggctccgggaaaaaagaggccggtagagcactctcctgcggagccagactcctcctcgggaaccggaaaagcgggccagcagcctgcaagaaagagattgaatttcggtcagactggagacgcagactccgtacctgacccccagcctctcggacagccaccagcagcccccacaagtttgggatctactacagtggctacaggcagtggcgcaccaatggcagacaataacgagggtgccgatggagtgggtaattcctcaggaaattggcattgcgattcccaatggctgggcgacagagtcatcaccaccagcacccgaacctgggccctgcccacctacaacaaccacctctacaagcaaatctccagccaatcaggagcatcgaacgacaaccactactttggctacagcaccccttgggggtattttgacttcaacagattccactgtcacttctccccacgtgactggcaaagactcatcaacaacaactggggattccgacccaagagactcaacttcaagctctttaacattcaagtcaaagaggtcacgcagaatgacggtacgacgacgattgccaataaccttaccagcacggttcaggtgtttactgactcggagtaccagctcccgtacgtcctcggctcggcgcatcaaggatgcctcccgccgtttccagcggacgtcttcatggtcccacagtatggatacctcaccctgaacaacgggagtcaggcggtaggacgctcttccttttactgcctggagtactttccttctcagatgctgcgtaccggaaacaactttaccttcagctacacctttgaggacgtgcctttccacagcagctacgctcacagccagagtttggaccggctgatgaatcctctgatcgaccagtatctgtattatctgaacaggacacaatcaaatagtggaactcttcagcagtctaggctactgtttagccaagctggacccaccagcatgtctcttcaagctaaaaactggctgcctggaccttgctacagacagcagcgtctgtcaaagcaggcaaacgacaacaacaacagcaactttccctggactgcggctacaaagtatcatctaaatggtcgggactcgttggttaatccaggaccagctatggccagccacaaagacgatgaagaaaagtttttccccatgcatggaaccctgatatttggtaaacaaggaacaaatgctaacgacgcggatttggaacatgtcatgattacagatgaagaagaaatcaggaccaccaatcccgtggctacagagcagtacggaaacgtgtcaaataatttgcaaaactcaaatactggtccaactacagaaaatgtcaatcaccagggagcgttacctggtatggtgtggcaggatcgagacgtgtacctgcagggacccatttgggccaagattcctcacaccgacggacactttcacccttctccactgatgggaggttttggactcaaacacccgcctcctcaaatcatgatcaaaaacactcctgttccagccaatcctcctacaaacttcagcgcggcaaagtttgcttccttcatcacacagtattccacgggacaggtcagcgtggagatcgagtgggagctgcagaaggagaacagcaaacgctggaaccccgagatccagtacacttccaactacaacaaatctgttaatgtggactttactgtggacactaatggtgtgtattcagagcctcgccccattggcaccagatacctgactcgtaatctgtaa

SEQ ID NO: 4433 - DNA, 2208 bp, synthetic construct
  misc_feature 1..2208: note = source = /note="Description of Artificial Sequence: Synthetic polynucleotide"
  source 1..2208: mol_type = other DNA
atggctgccgatggttatcttccagattggctcgaggacactctctctgaaggaataagacagtggtggaagctcaaacctggcccaccaccaccaaagcccgcagagcggcatcaggacgacagcaggggtcttgtgcttcctgggtacaagtacctcggacccttcaacggactcgacaaaggagagccggtcaacgaggcagacgctgcggccctcgagcacgacaaggcctacgaccggcagctcgacagcggagacaacccgtacctcaagtacaaccacgccgacgcggagtttcaggagcgtcttaaagaagatacgtcttttgggggcaacctcggacgagcagtcttccaggcgaaaaagagggttcttgaacctctgggcctggttgaggaacctgttaagacggctccgggaaaaaagaggccggtagagcactctcctgcggagccagactcctcctcgggaaccggaaaagcgggccagcagcctgcaagaaagagattgaatttcggtcagactggagacgcagactccgtacctgacccccagcctctcggacagccaccagcagcccccacaagtttgggatctactacaatggctacaggcagtggcgcaccaatggcagacaataacgagggtgccgatggagtgggtaattcctcaggaaattggcattgcgattcccaatggctgggcgacagagtcatcaccaccagcacccgaacctgggccctgcccacctacaacaaccacctctacaagcaaatctccagccaatcaggagcatcgaacgacaaccactactttggctacagcaccccttgggggtattttgacttcaacagattccactgtcacttctccccacgtgactggcaaagactcatcaacaacaactggggattccgacccaagagactcaacttcaagctctttaacattcaagtcaaagaggtcacgcagaatgacggtacgacgacgattgccaataaccttaccagcacggttcaggtgtttactgactcggagtaccagctcccgtacgtcctcggctcggcgcatcaaggatgcctcccgccgtttccagcggacgtcttcatggtcccacagtatggatacctcaccctgaacaacgggagtcaggcggtaggacgctcttccttttactgcctggagtactttccttctcagatgctgcgtaccggaaacaactttaccttcagctacacctttgaggacgtgcctttccacagcagctacgctcacagccagagtttggaccggctgatgaatcctctgatcgaccagtatctgtattatctgaacaggacacaatcaaatagtggaactcttcagcagtctaggctactgtttagccaagctggacccaccagcatgtctcttcaagctaaaaactggctgcctggaccttgctacagacagcagcgtctgtcaaagcaggcaaacgacaacaacaacagcaactttccctggactgcggctacaaagtatcatctaaatggtcgggactcgttggttaatccaggaccagctatggccagccacaaaggcgatgaagaaaagtttttccccatgcatggaaccctgatatttggtaaacaaggaacaaatgctaacgacgcggatttggaacatgtcatgattacagatgaagaagaaatcaggaccaccaatcccgtggctacagagcagtacggaaacgtgtcaaataatttgcaaaactcaaatactggtccaactacagaaaatgtcaatcaccagggagcgttacctggtatggtgtggcaggatcgagacgtgtacctgcagggacccatttgggccaagattcctcacaccgacggacactttcacccttctccactgatgggaggttttggactcaaacacccgcctcctcaaatcatgatcaaaaacactcctgttccagccaatcctcctacaaacttcagcgcggcaaagtttgcttccttcatcacacagtattccacgggacaggtcagcgtggagatcgagtgggagctgcagaaggagaacagcaaacgctggaaccccgagatccagtacacttccaactacaacaaatctgttaatgtggactttactgtggacactaatggtgtgtattcagagcctcgccccattggcaccagatacctgactcgtaatctgtaa

SEQ ID NO: 4434 - DNA, 2208 bp, synthetic construct
  misc_feature 1..2208: note = source = /note="Description of Artificial Sequence: Synthetic polynucleotide"
  source 1..2208: mol_type = other DNA
atggctgccgatggttatcttccagattggctcgaggacactctctctgaaggaataagacagtggtggaagctcaaacctggcccaccaccaccaaagcccgcagagcggcatcaggacgacagcaggggtcttgtgcttcctgggtacaagtacctcggacccttcaacggactcgacaaaggagagccggtcaacgaggcagacgctgcggccctcgagcacgacaaggcctacgaccggcagctcgacagcggagacaacccgtacctcaagtacaaccacgccgacgcggagtttcaggagcgtcttaaagaagatacgtcttttgggggcaacctcggacgagcagtcttccaggcgaaaaagagggttcttgaacctctgggcctggttgaggaacctgttaagacggctccgggaaaaaagaggccggtagagcactctcctgcggagccagactcctcctcgggaaccggaaaagcgggccagcagcctgcaagaaagggattgaatttcggtcagactggagacgcagactccgtacctgacccccagcctctcggacagccaccagcagcccccacaagtttgggatctactacaatggctacaggcagtggcgcaccaatggcagacaataacgagggtgccgatggagtgggtaattcctcaggaaattggcattgcgattcccaatggctgggcgacagagtcatcaccaccagcacccgaacctgggccctgcccacctacaacaaccacctctacaagcaaatctccagccaatcaggagcatcgaacgacaaccactactttggctacagcaccccttgggggtattttgacttcaacagattccactgtcacttctccccacgtgactggcaaagactcatcaacaacaactggggattccgacccaagagactcaacttcaagctctttaacattcaagtcaaagaggtcacgcagaatgacggtacgacgacgattgccaataaccttaccagcacggttcaggtgtttactgactcggagtaccagctcccgtacgtcctcggctcggcgcatcaaggatgcctcccgccgtttccagcggacgtcttcatggtcccacagtatggatacctcaccctgaacaacgggagtcaggcggtaggacgctcttccttttactgcctggagtactttccttctcagatgctgcgtaccggaaacaactttaccttcagctacacctttgaggacgtgcctttccacagcagctacgctcacagccagagtttggaccggctgatgaatcctctgatcgaccagtatctgtattatctgaacaggacacaatcaaatagtggaactcttcagcagtctaggctactgtttagccaagctggacccaccagcatgtctcttcaagctaaaaactggctgcctggaccttgctacagacagcagcgtctgtcaaagcaggcaaacgacaacaacaacagcaactttccctggactgcggctacaaagtatcatctaaatggtcgggactcgttggttaatccaggaccagctatggccagccacaaagacgatgaagaaaagtttttccccatgcatggaaccctgatatttggtaaacaaggaacaaatgctaacgacgcggatttggaacatgtcatgattacagatgaagaagaaatcaggaccaccaatcccgtggctacagagcagtacggaaacgtgtcaaataatttgcaaaactcaaatactggtccaactacagaaaatgtcaatcaccagggagcgttacctggtatggtgtggcaggatcgagacgtgtacctgcagggacccatttgggccaagattcctcacaccgacggacactttcacccttctccactgatgggaggttttggactcaaacacccgcctcctcaaatcatgatcaaaaacactcctgttccagccaatcctcctacaaacttcagcgcggcaaagtttgcttccttcatcacacagtattccacgggacaggtcagcgtggagatcgagtgggagctgcagaaggagaacagcaaacgctggaaccccgagatccagtacacttccaactacaacaaatctgttaatgtggactttactgtggacactaatggtgtgtattcagagcctcgccccattggcaccagatacctgactcgtaatctgtaa

SEQ ID NO: 4435 - DNA, 2208 bp, synthetic construct
  misc_feature 1..2208: note = source = /note="Description of Artificial Sequence: Synthetic polynucleotide"
  source 1..2208: mol_type = other DNA
atggctgccgatggttatcttccagattggctcgaggacactctctctgaaggaataagacagtggtggaagctcaaacctggcccaccaccaccaaagcccgcagagcggcatcaggacgacagcaggggtcttgtgcttcctgggtacaagtacctcggacccttcaacggactcgacaaaggagagccggtcaacgaggcagacgctgcggccctcgagcacgacaaggcctacgaccggcagctcgacagcggagacaacccgtacctcaagtacaaccacgccgacgcggagtttcaggagcgtcttaaagaagatacgtcttttgggggcaacctcggacgagcagtcttccaggcgaaaaagagggttcttgaacctctgggcctggttgaggaacctgttaagacggctccgggaaaaaagaggccggtagagcactctcctgcggagccagactcctcctcgggaaccggaaaagcgggccagcagcctgcaagaaagagattgaatttcggtcagactggagacgcagactccgtacctgacccccagcctctcggacagccaccagcagcccccacaagtttgggatctactacaatggctacaggcagtggcgcaccaatggcagacaataacgagggtgccgatggagtgggtaattcctcaggaaattggcattgcgattcccaatggctgggcgacagagtcatcaccaccagcacccgaacctgggccctgcccacctacaacaaccacctctacaagcaaatctccagccaatcaggagcatcgaacgacaaccactactttggctacagcaccccttgggggtattttgacttcaacagattccactgtcacttctccccacgtgactggcaaagactcatcaacaacaactggggattccgacccaagagactcaacttcaagctctttaacattcaagtcaaagaggtcacgcagaatgacggtacggcgacgattgccaataaccttaccagcacggttcaggtgtttactgactcggagtaccagctcccgtacgtcctcggctcggcgcatcaaggatgcctcccgccgtttccagcggacgtcttcatggtcccacagtatggatacctcaccctgaacaacgggagtcaggcggtaggacgctcttccttttactgcctggagtactttccttctcagatgctgcgtaccggaaacaactttaccttcagctacacctttgaggacgtgcctttccacagcagctacgctcacagccagagtttggaccggctgatgaatcctctgatcgaccagtatctgtattatctgaacaggacacaatcaaatagtggaactcttcagcagtctaggctactgtttagccaagctggacccaccagcatgtctcttcaagctaaaaactggctgcctggaccttgctacagacagcagcgtctgtcaaagcaggcaaacgacaacaacaacagcaactttccctggactgcggctacaaagtatcatctaaatggtcgggactcgttggttaatccaggaccagctatggccagccacaaagacgatgaagaaaagtttttccccatgcatggaaccctgatatttggtaaacaaggaacaaatgctaacgacgcggatttggaacatgtcatgattacagatgaagaagaaatcaggaccaccaatcccgtggctacagagcagtacggaaacgtgtcaaataatttgcaaaactcaaatactggtccaactacagaaaatgtcaatcaccagggagcgttacctggtatggtgtggcaggatcgagacgtgtacctgcagggacccatttgggccaagattcctcacaccgacggacactttcacccttctccactgatgggaggttttggactcaaacacccgcctcctcaaatcatgatcaaaaacactcctgttccagccaatcctcctacaaacttcagcgcggcaaagtttgcttccttcatcacacagtattccacgggacaggtcagcgtggagatcgagtgggagctgcagaaggagaacagcaaacgctggaaccccgagatccagtacacttccaactacaacaaatctgttaatgtggactttactgtggacactaatggtgtgtattcagagcctcgccccattggcaccagatacctgactcgtaatctgtaa

SEQ ID NO: 4436 - DNA, 2208 bp, synthetic construct
  misc_feature 1..2208: note = source = /note="Description of Artificial Sequence: Synthetic polynucleotide"
  source 1..2208: mol_type = other DNA
atggctgccgatggttatcttccagattggctcgaggacactctctctgaaggaataagacagtggtggaagctcaaacctggcccaccaccaccaaagcccgcagagcggcatcaggacgacagcaggggtcttgtgcttcctgggtacaagtacctcggacccttcaacggactcgacaaaggagagccggtcaacgaggcagacgctgcggccctcgagcacgacaaggcctacgaccggcagctcgacagcggagacaacccgtacctcaagtacaaccacgccgacgcggagtttcaggagcgtcttaaagaagatacgtcttttgggggcaacctcggacgagcagtcttccaggcgaaaaagagggttcttgaacctctgggcctggttgaggaacctgttaagacggctccgggaaaaaagaggccggtagagcactctcctgcggagccagactcctcctcgggaaccggaaaagcgggccagcagcctgcaagaaggagattgaatttcggtcagactggagacgcagactccgtacctgacccccagcctctcggacagccaccagcagcccccacaagtttgggatctactacaatggctacaggcagtggcgcaccaatggcagacaataacgagggtgccgatggagtgggtaattcctcaggaaattggcattgcgattcccaatggctgggcgacagagtcatcaccaccagcacccgaacctgggccctgcccacctacaacaaccacctctacaagcaaatctccagccaatcaggagcatcgaacgacaaccactactttggctacagcaccccttgggggtattttgacttcaacagattccactgtcacttctccccacgtgactggcaaagactcatcaacaacaactggggattccgacccaagagactcaacttcaagctctttaacattcaagtcaaagaggtcacgcagaatgacggtacgacgacgattgccaataaccttaccagcacggttcaggtgtttactgactcggagtaccagctcccgtacgtcctcggctcggcgcatcaaggatgcctcccgccgtttccagcggacgtcttcatggtcccacagtatggatacctcaccctgaacaacgggagtcaggcggtaggacgctcttccttttactgcctggagtactttccttctcagatgctgcgtaccggaaacaactttaccttcagctacacctttgaggacgtgcctttccacagcagctacgctcacagccagagtttggaccggctgatgaatcctctgatcgaccagtatctgtattatctgaacaggacacaatcaaatagtggaactcttcagcagtctaggctactgtttagccaagctggacccaccagcatgtctcttcaagctaaaaactggctgcctggaccttgctacagacagcagcgtctgtcaaagcaggcaaacgacaacaacaacagcaactttccctggactgcggctacaaagtatcatctaaatggtcgggactcgttggttaatccaggaccagctatggccagccacaaagacgatgaagaaaagtttttccccatgcatggaaccctgatatttggtaaacaaggaacaaatgctaacgacgcggatttggaacatgtcatgattacagatgaagaagaaatcaggaccaccaatcccgtggctacagagcagtacggaaacgtgtcaaataatttgcaaaactcaaatactggtccaactacagaaaatgtcaatcaccagggagcgttacctggtatggtgtggcaggatcgagacgtgtacctgcagggacccatttgggccaagattcctcacaccgacggacactttcacccttctccactgatgggaggttttggactcaaacacccgcctcctcaaatcatgatcaaaaacactcctgttccagccaatcctcctacaaacttcagcgcggcaaagtttgcttccttcatcacacagtattccacgggacaggtcagcgtggagatcgagtgggagctgcagaaggagaacagcaaacgctggaaccccgagatccagtacacttccaactacaacaaatctgttaatgtggactttactgtggacactaatggtgtgtattcagagcctcgccccattggcaccagatacctgactcgtaatctgtaa

SEQ ID NO: 4437 - DNA, 2208 bp, synthetic construct
  misc_feature 1..2208: note = source = /note="Description of Artificial Sequence: Synthetic polynucleotide"
  source 1..2208: mol_type = other DNA
atggctgccgatggttatcttccagattggctcgaggacactctctctgaaggaataagacagtggtggaagctcaaacctggcccaccaccaccaaagcccgcagagcggcatcaggacgacagcaggggtcttgtgcttcctgggtacaagtacctcggacccttcaacggactcgacaaaggagagccggtcaacgaggcagacgctgcggccctcgagcacgacaaggcctacgaccggcagctcgacagcggagacaacccgtacctcaagtacaaccacgccgacgcggagtttcaggagcgtcttaaagaagatacgtcttttgggggcaacctcggacgagcagtcttccaggcgaaaaagagggttcttgaacctctgggcctggttgaggaacctgttaagacggctccgggaaaaaagaggccggtagagcactctcctgcggagccagactcctcctcgggaaccggaaaagcgggccagcagcctgcaagaaagagattgaatttcggtcagactggagacgcagactccgtacctgacccccagcctctcggacagccaccagcagcccccacaagtttgggatctactacaatggctacaggcagtggcgcaccaatggcagacaataacgagggtgccgatggagtgggtaattcctcaggaaattggcattgcgattcccaatggctgggcgacagagtcatcaccaccagcacccgaacctgggccctgcccacctacaacaaccacctctacaagcaaatctccagccaatcaggagcatcgaacgacaaccactactttggctacagcaccccttgggggtattttgacttcaacagattccactgtcacttctccccacgtgactggcaaagactcatcaacaacaactggggattccgacccaagagactcaacttcaagctctttaacattcaagtcaaagaggtcacgcagaatgacggtacgacgacgattgccaataaccttaccagcacggttcaggtgtttactgactcggagtaccagctcccgtacgtcctcggctcggcgcatcaaggatgcctcccgccgtttccagcggacgtcttcatggtcccacagtatggatacctcaccctgaacaacgggagtcaggcggtaggacgctcttccttttactgcctggagtactttccttctcagatgctgcgtaccggaaacaactttaccttcagctacacctttgaggacgtgcctttccacagcagctacgctcacagccagagtttggaccggctgatgaatcctctgatcgaccagtatctgtattatctgaacaggacacaatcaaatagtggaactcttcagcagtctaggctactgtttagccaagctggacccaccagcatgtctcttcaagctaaaaactggctgcctggaccttgctacagacagcagcgtctgtcaaagcaggcaaacgacaacaacaacagcaactttccctggactgcggctacaaagtatcatctaaatggtcgggactcgttggttaatccaggaccagctatggccagccacaaagacgatgaagaaaagtttttccccatgcatggaaccctgatatttggtaaacaaggaacaaatgctaacgacgcggatttggaacatgtcatgattacagatgaagaagaaatcaggaccaccaatcccgtggctacagagcagtacggaaacgtgtcaaataatttgcaaaactcaaatactggtccaactacagaaaatgtcaatcaccagggagcgttacctggtatggtgtggcaggatcgagacgtgtacctgcagggacccatttgggccaagattcctcacaccgacggacactttcacccttctccactgatgggaggttttggactcaaacacccgcctcctcaaatcatgatcaaaaacactcctgttccagccaatcctcctacaaacttcagcgcggcaaagtttgcttccctcatcacacagtattccacgggacaggtcagcgtggagatcgagtgggagctgcagaaggagaacagcaaacgctggaaccccgagatccagtacacttccaactacaacaaatctgttaatgtggactttactgtggacactaatggtgtgtattcagagcctcgccccattggcaccagatacctgactcgtaatctgtaa

SEQ ID NO: 4438 - DNA, 2208 bp, synthetic construct
  misc_feature 1..2208: note = source = /note="Description of Artificial Sequence: Synthetic polynucleotide"
  source 1..2208: mol_type = other DNA
atggctgccgatggttatcttccagattggctcgaggacactctctctgaaggaataagacagtggtggaagctcaaacctggcccaccaccaccaaagcccgcagagcggcatcaggacgacagcaggggtcttgtgcttcctgggtacaagtacctcggacccttcaacggactcgacaaaggagagccggtcaacgaggcagacgctgcggccctcgagcacgacaaggcctacgaccggcagctcgacagcggagacaacccgtacctcaagtacaaccacgccgacgcggagtttcaggagcgtcttaaagaagatacgtcttttgggggcaacctcggacgagcagtcttccaggcgaaaaagagggttcttgaacctctgggcctggttgaggaacctgttaagacggctccgggaaaaaagaggccggtagagcactctcctgcggagccagactcctcctcgggaaccggaaaagcgggccagcagcctgcaagaaagagattgaatttcggtcagactggagacgcagactccgtacctgacccccagcctctcggacagccaccagcagcccccacaagtttgggatctactacaatggctacaggcagtggcgcaccaatggcagacaataacgagggtgccgatggagtgggtaattcctcaggaaattggcattgcgattcccaatggctgggcgacagagtcatcaccaccagcacccgaacctgggccctgcccacctacaacaaccacctctacaagcaaatctccagccaatcaggagcatcgaacgacaaccactactttggctacagcaccccttgggggtattttgacttcaacagattccactgtcacttctccccacgtgactggcaaagactcatcaacaacaactggggattccgacccaagagactcagcttcaagctctttaacattcaagtcaaagaggtcacgcagaatgacggtacgacgacgattgccaataaccttaccagcacggttcaggtgtttactgactcggagtaccagctcccgtacgtcctcggctcggcgcatcaaggatgcctcccgccgtttccagcggacgtcttcatggtcccacagtatggatacctcaccctgaacaacgggagtcaggcggtaggacgctcttccttttactgcctggagtactttccttctcagatgctgcgtaccggaaacaactttaccttcagctacacctttgaggacgtgcctttccacagcagctacgctcacagccagagtttggaccggctgatgaatcctctgatcgaccagtatctgtattatctgaacaggacacaatcaaatagtggaactcttcagcagtctaggctactgtttagccaagctggacccaccagcatgtctcttcaagctaaaaactggctgcctggaccttgctacagacagcagcgtctgtcaaagcaggcaaacgacaacaacaacagcaactttccctggactgcggctacaaagtatcatctaaatggtcgggactcgttggttaatccaggaccagctatggccagccacaaagacgatgaagaaaagtttttccccatgcatggaaccctgatatttggtaaacaaggaacaaatgctaacgacgcggatttggaacatgtcatgattacagatgaagaagaaatcaggaccaccaatcccgtggctacagagcagtacggaaacgtgtcaaataatttgcaaaactcaaatactggtccaactacagaaaatgtcaatcaccagggagcgttacctggtatggtgtggcaggatcgagacgtgtacctgcagggacccatttgggccaagattcctcacaccgacggacactttcacccttctccactgatgggaggttttggactcaaacacccgcctcctcaaatcatgatcaaaaacactcctgttccagccaatcctcctacaaacttcagcgcggcaaagtttgcttccttcatcacacagtattccacgggacaggtcagcgtggagatcgagtgggagctgcagaaggagaacagcaaacgctggaaccccgagatccagtacacttccaactacaacaaatctgttaatgtggactttactgtggacactaatggtgtgtattcagagcctcgccccattggcaccagatacctgactcgtaatctgtaa

SEQ ID NO: 4439 - DNA, 2208 bp, synthetic construct
  misc_feature 1..2208: note = source = /note="Description of Artificial Sequence: Synthetic polynucleotide"
  source 1..2208: mol_type = other DNA
atggctgccgatggttatcttccagattggctcgaggacactctctctgaaggaataagacagtggtggaagctcaaacctggcccaccaccaccaaagcccgcagagcggcatcaggacgacagcaggggtcttgtgcttcctgggtacaagtacctcggacccttcaacggactcgacaaaggagagccggtcaacgaggcagacgctgcggccctcgagcacgacaaggcctacgaccggcagctcgacagcggagacaacccgtacctcaagtacaaccacgccgacgcggagtttcaggagcgtcttaaagaagatacgtcttttgggggcaacctcggacgagcagtcttccaggcgaaaaagagggttcttgaacctctgggcctggttgaggaacctgttaagacggctccgggaaaaaagaggccggtagagcactctcctgcggagccagactcctcctcgggaaccggaaaagcgggccagcagcctgcaagaaagagattgaatttcggtcagactggagacgcagactccgtacctgacccccagcctctcggacagccaccagcagcccccacaagtttgggatctactacaatggctacaggcagtggcgcaccaatggcagacaataacgagggtgccgatggagtgggtaattcctcaggaaattggcattgcgattcccaatggctgggcgacagagtcatcaccaccagcacccgaacctgggccctgcccacctacaacaaccacctctacaagcaaatctccagccaatcaggagcatcgaacgacaaccactactttggctacagcaccccttgggggtattttgacttcaacagattccactgtcacttctccccacgtgactggcaaagactcatcaacaacaactggggattccgacccaagagactcaacttcaagctctttaacattcaagtcaaagaggtcacgcagaatgacggtacgacgacgattgccaataaccttaccagcacggttcaggtgtttactgactcggagtaccagctcccgtacgtcctcggctcggcgcatcaaggatgcctcccgccgtttccagcggacgtcttcatggtcccacagtatggatacctcaccctgaacaacgggagtcaggcggtaggacgctcttccttttactgcctggagtactttccttctcagatgctgcgtaccggaaacaactttaccttcagctacacctttgaggacgtgcctttccacagcagctacgctcacagccagagtttggaccggctgatgaatcctctgatcgaccagtatctgtattatctgaacaggacacaatcaaatagtggaactcttcagcagtctaggctactgtttagccaagctggacccaccagcatgtctcttcaagctaaaaactggctgcctggaccttgctacagacagcagcgtctgtcaaagcaggcaaacgacaacaacaacagcaactttccctggactgcggctacaaagtatcatctaaatggtcgggactcgttggttaatccaggaccagctatggccagccacaaagacgatgaagaaaagtttttccccatgcatggaaccctgatatttggtaaacaaggaacaaatgctaacgacgcggatttggaacatgtcatgattacagatgaagaagaaatcaggaccaccaatcccgtggctacagggcagtacggaaacgtgtcaaataatttgcaaaactcaaatactggtccaactacagaaaatgtcaatcaccagggagcgttacctggtatggtgtggcaggatcgagacgtgtacctgcagggacccatttgggccaagattcctcacaccgacggacactttcacccttctccactgatgggaggttttggactcaaacacccgcctcctcaaatcatgatcaaaaacactcctgttccagccaatcctcctacaaacttcagcgcggcaaagtttgcttccttcatcacacagtattccacgggacaggtcagcgtggagatcgagtgggagctgcagaaggagaacagcaaacgctggaaccccgagatccagtacacttccaactacaacaaatctgttaatgtggactttactgtggacactaatggtgtgtattcagagcctcgccccattggcaccagatacctgactcgtaatctgtaa

SEQ ID NO: 4440 - DNA, 2208 bp, synthetic construct
  misc_feature 1..2208: note = source = /note="Description of Artificial Sequence: Synthetic polynucleotide"
  source 1..2208: mol_type = other DNA
atggctgccgatggttatcttccagattggctcgaggacactctctctgaaggaataagacagtggtggaagctcaaacctggcccaccaccaccaaagcccgcagagcggcatcaggacgacagcaggggtcttgtgcttcctgggtacaagtacctcggacccttcaacggactcgacaaaggagagccggtcaacgaggcagacgctgcggccctcgagcacgacaaggcctacgaccggcagctcgacagcggagacaacccgtacctcaagtacaaccacgccgacgcggagtttcaggagcgtcttaaagaagatacgtcttttgggggcaacctcggacgagcagtcttccaggcgaaaaagagggttcttgaacctctgggcctggttgaggaacctgttaagacggctccgggaaaaaagaggccggtagagcactctcctgcggagccagactcctcctcgggaaccggaaaagcgggccagcagcctgcaagaaagagattgaatttcggtcagactggagacgcagactccgtacctgacccccagcctctcggacagccaccagcagcccccacaagtttgggatctactacaatggctacaggcagtggcgcaccaatggcagacaataacgagggtgccgatggagtgggtaattcctcaggaaattggcattgcgattcccaatggctgggcgacagagtcatcaccaccagcacccgaacctgggccctgcccacctacaacaaccacctctacaagcaaatctccagccaatcaggagcatcgaacgacaaccactactttggctacagcaccccttgggggtattttgacttcaacagattccactgtcacttctccccacgtgactggcaaagactcatcaacaacaactggggattccgacccaagagactcaacttcaagctctttaacattcaagtcaaagaggtcacgcagaatgacggtacgacgacgattgccaataaccttaccagcacggttcaggtgtttactgactcggagtaccagctcccgtacgtcctcggctcggcgcatcaaggatgcctcccgccgtttccagcggacgtcttcatggtcccacagtatggatacctcaccctgaacaacgggagtcaggcggtaggacgctcttccttttactgcctggagtactttccttctcagatgctgcgtaccggaaacaactttaccttcagctacacctttgaggacgtgcctttccacagcagctacgctcacagccagagtttggaccggctgatgaatcctctgatcgaccagtatctgtattatctgaacaggacacaatcaaatagtggaactcttcagcagtctaggctactgtttagccaagctggacccaccagcatgtctcttcaagctaaaaactggctgcctggaccttgctacagacagcagcgtctgtcaaagcaggcaaacgacaacaacaacagcaactttccctggactgcggctacaaagtatcatctaaatggtcgggactcgttggttaatccaggaccagctatggccagccacaaagacgatgaagaaaagtttttccccatgcatggaaccctgatatttggtaaacaaggaacaaatgctaacgacgcggatttggaacatgtcatgattacagatgaagaagaaatcaggaccaccaatcccgtggctacagagcagtacggaaacgtgccaaataatttgcaaaactcaaatactggtccaactacagaaaatgtcaatcaccagggagcgttacctggtatggtgtggcaggatcgagacgtgtacctgcagggacccatttgggccaagattcctcacaccgacggacactttcacccttctccactgatgggaggttttggactcaaacacccgcctcctcaaatcatgatcaaaaacactcctgttccagccaatcctcctacaaacttcagcgcggcaaagtttgcttccttcatcacacagtattccacgggacaggtcagcgtggagatcgagtgggagctgcagaaggagaacagcaaacgctggaaccccgagatccagtacacttccaactacaacaaatctgttaatgtggactttactgtggacactaatggtgtgtattcagagcctcgccccattggcaccagatacctgactcgtaatctgtaa

SEQ ID NO: 4441 - DNA, 2208 bp, synthetic construct
  misc_feature 1..2208: note = source = /note="Description of Artificial Sequence: Synthetic polynucleotide"
  source 1..2208: mol_type = other DNA
atggctgccgatggttatcttccagattggctcgaggacactctctctgaaggaataagacagtggtggaagctcaaacctggcccaccaccaccaaagcccgcagagcggcatcaggacgacagcaggggtcttgtgcttcctgggtacaagtacctcggacccttcaacggactcgacaaaggagagccggtcaacgaggcagacgctgcggccctcgagcacgacaaggcctacgaccggcagctcgacagcggagacaacccgtacctcaagtacaaccacgccgacgcggagtttcaggagcgtcttaaagaagatacgtcttttgggggcaacctcggacgagcagtcttccaggcgaaaaagagggttcttgaacctctgggcctggttgaggaacctgttaagacggctccgggaaaaaagaggccggtagagcactctcctgcggagccagactcctcctcgggaaccggaaaagcgggccagcagcctgcaagaaagagattgaatttcggtcagactggagacgcagactccgtacctgacccccagcctctcggacagccaccagcagcccccacaagtttgggatctactacaatggctacaggcagtggcgcaccaatggcagacaataacgagggtgccgatggagtgggtaattcctcaggaaattggcattgcgattcccaatggctgggcgacagagtcatcaccaccagcacccgaacctgggccctgcccacctacaacaaccacctctacaagcaaatctccagccaatcaggagcatcgaacgacaaccactactttggctacagcaccccttgggggtattttgacttcaacagattccactgtcacttctccccacgtgactggcaaagactcatcaacaacaactggggattccgacccaagagactcaacttcaagctctttaacattcaagtcaaagaggtcacgcagaatgacggtacgacgacgattgccaataaccttaccagcacggttcaggtgtttactgactcggagtaccagctcccgtacgtcctcggctcggcgcatcaaggatgcctcccgccgtttccagcggacgtcttcatggtcccacagtatggatacctcaccccgaacaacgggagtcaggcggtaggacgctcttccttttactgcctggagtactttccttctcagatgctgcgtaccggaaacaactttaccttcagctacacctttgaggacgtgcctttccacagcagctacgctcacagccagagtttggaccggctgatgaatcctctgatcgaccagtatctgtattatctgaacaggacacaatcaaatagtggaactcttcagcagtctaggctactgtttagccaagctggacccaccagcatgtctcttcaagctaaaaactggctgcctggaccttgctacagacagcagcgtctgtcaaagcaggcaaacgacaacaacaacagcaactttccctggactgcggctacaaagtatcatctaaatggtcgggactcgttggttaatccaggaccagctatggccagccacaaagacgatgaagaaaagtttttccccatgcatggaaccctgatatttggtaaacaaggaacaaatgctaacgacgcggatttggaacatgtcatgattacagatgaagaagaaatcaggaccaccaatcccgtggctacagagcagtacggaaacgtgtcaaataatttgcaaaactcaaatactggtccaactacagaaaatgtcaatcaccagggagcgttacctggtatggtgtggcaggatcgagacgtgtacctgcagggacccatttgggccaagattcctcacaccgacggacactttcacccttctccactgatgggaggttttggactcaaacacccgcctcctcaaatcatgatcaaaaacactcctgttccagccaatcctcctacaaacttcagcgcggcaaagtttgcttccttcatcacacagtattccacgggacaggtcagcgtggagatcgagtgggagctgcagaaggagaacagcaaacgctggaaccccgagatccagtacacttccaactacaacaaatctgttaatgtggactttactgtggacactaatggtgtgtattcagagcctcgccccattggcaccagatacctgactcgtaatctgtaa

SEQ ID NO: 4442 - DNA, 2208 bp, synthetic construct
  misc_feature 1..2208: note = source = /note="Description of Artificial Sequence: Synthetic polynucleotide"
  source 1..2208: mol_type = other DNA
atggctgccgatggttatcttccagattggctcgaggacactctctctgaaggaataagacagtggtggaagctcaaacctggcccaccaccaccaaagcccgcagagcggcatcaggacgacagcaggggtcttgtgcttcctgggtacaagtacctcggacccttcaacggactcgacaaaggagagccggtcaacgaggcagacgctgcggccctcgagcacgacaaggcctacgaccggcagctcgacagcggagacaacccgtacctcaagtacaaccacgccgacgcggagtttcaggagcgtcttaaagaagatacgtcttttgggggcaacctcggacgagcagccttccaggcgaaaaagagggttcttgaacctctgggcctggttgaggaacctgttaagacggctccgggaaaaaagaggccggtagagcactctcctgcggagccagactcctcctcgggaaccggaaaagcgggccagcagcctgcaagaaagagattgaatttcggtcagactggagacgcagactccgtacctgacccccagcctctcggacagccaccagcagcccccacaagtttgggatctactacaatggctacaggcagtggcgcaccaatggcagacaataacgagggtgccgatggagtgggtaattcctcaggaaattggcattgcgattcccaatggctgggcgacagagtcatcaccaccagcacccgaacctgggccctgcccacctacaacaaccacctctacaagcaaatctccagccaatcaggagcatcgaacgacaaccactactttggctacagcaccccttgggggtattttgacttcaacagattccactgtcacttctccccacgtgactggcaaagactcatcaacaacaactggggattccgacccaagagactcaacttcaagctctttaacattcaagtcaaagaggtcacgcagaatgacggtacgacgacgattgccaataaccttaccagcacggttcaggtgtttactgactcggagtaccagctcccgtacgtcctcggctcggcgcatcaaggatgcctcccgccgtttccagcggacgtcttcatggtcccacagtatggatacctcaccctgaacaacgggagtcaggcggtaggacgctcttccttttactgcctggagtactttccttctcagatgctgcgtaccggaaacaactttaccttcagctacacctttgaggacgtgcctttccacagcagctacgctcacagccagagtttggaccggctgatgaatcctctgatcgaccagtatctgtattatctgaacaggacacaatcaaatagtggaactcttcagcagtctaggctactgtttagccaagctggacccaccagcatgtctcttcaagctaaaaactggctgcctggaccttgctacagacagcagcgtctgtcaaagcaggcaaacgacaacaacaacagcaactttccctggactgcggctacaaagtatcatctaaatggtcgggactcgttggttaatccaggaccagctatggccagccacaaagacgatgaagaaaagtttttccccatgcatggaaccctgatatttggtaaacaaggaacaaatgctaacgacgcggatttggaacatgtcatgattacagatgaagaagaaatcaggaccaccaatcccgtggctacagagcagtacggaaacgtgtcaaataatttgcaaaactcaaatactggtccaactacagaaaatgtcaatcaccagggagcgttacctggtatggtgtggcaggatcgagacgtgtacctgcagggacccatttgggccaagattcctcacaccgacggacactttcacccttctccactgatgggaggttttggactcaaacacccgcctcctcaaatcatgatcaaaaacactcctgttccagccaatcctcctacaaacttcagcgcggcaaagtttgcttccttcatcacacagtattccacgggacaggtcagcgtggagatcgagtgggagctgcagaaggagaacagcaaacgctggaaccccgagatccagtacacttccaactacaacaaatctgttaatgtggactttactgtggacactaatggtgtgtattcagagcctcgccccattggcaccagatacctgactcgtaatctgtaa

SEQ ID NO: 4443 - DNA, 2208 bp, synthetic construct
  misc_feature 1..2208: note = source = /note="Description of Artificial Sequence: Synthetic polynucleotide"
  source 1..2208: mol_type = other DNA
atggctgccgatggttatcttccagattggctcgaggacactctctctgaaggaataagacagtggtggaagctcaaacctggcccaccaccaccaaagcccgcagagcggcatcaggacgacagcaggggtcttgtgcttcctgggtacaagtacctcggacccttcaacggactcgacaaaggagagccggtcaacgaggcagacgctgcggccctcgagcacgacaaggcctacgaccggcagctcgacagcggagacaacccgtacctcaagtacaaccacgccgacgcggagtttcaggagcgtcttaaagaagatacgtcttttgggggcaacctcggacgagcagtcttccaggcgaaaaagagggttcttgaacctctgggcctggttgaggaacctgttaagacggctccgggaaaaaagaggccggtagagcactctcctgcggagccagactcctcctcgggaaccggaaaagcgggccagcagcctgcaagaaagagattgaatttcggtcagactggagacgcagactccgtacctgacccccagcctctcggacagccaccagcagcccccacaagtttgggatctactacaatggctacaggcagtggcgcaccaatggcagacaataacgagggtgccgatggagtgggtaattcctcaggaaattggcattgcgattcccaatggctgggcgacagagtcatcaccaccagcacccgaacctgggccctgcccacctacaacaaccacctctacaagcaaatctccagccaatcaggagcatcgaacgacaaccactactttggctacagcaccccttgggggtattttgacttcaacagattccactgtcacttctccccacgtgactggcaaagactcatcaacaacaactggggattccgacccaagagactcaacttcaagctctttaacattcaagtcaaagaggtcacgcagaatgacggtacgacgacgattgccaataaccttaccagcacggttcaggtgtttactgactcggagtaccagctcccgtacgtcctcggctcggcgcatcaaggatgcctcccgccgtttccagcggacgtcttcatggtcccacagtatggatacctcaccctgaacaacgggagtcaggcggtaggacgctcttccttttactgcctggagtactttcctcctcagatgctgcgtaccggaaacaactttaccttcagctacacctttgaggacgtgcctttccacagcagctacgctcacagccagagtttggaccggctgatgaatcctctgatcgaccagtatctgtattatctgaacaggacacaatcaaatagtggaactcttcagcagtctaggctactgtttagccaagctggacccaccagcatgtctcttcaagctaaaaactggctgcctggaccttgctacagacagcagcgtctgtcaaagcaggcaaacgacaacaacaacagcaactttccctggactgcggctacaaagtatcatctaaatggtcgggactcgttggttaatccaggaccagctatggccagccacaaagacgatgaagaaaagtttttccccatgcatggaaccctgatatttggtaaacaaggaacaaatgctaacgacgcggatttggaacatgtcatgattacagatgaagaagaaatcaggaccaccaatcccgtggctacagagcagtacggaaacgtgtcaaataatttgcaaaactcaaatactggtccaactacagaaaatgtcaatcaccagggagcgttacctggtatggtgtggcaggatcgagacgtgtacctgcagggacccatttgggccaagattcctcacaccgacggacactttcacccttctccactgatgggaggttttggactcaaacacccgcctcctcaaatcatgatcaaaaacactcctgttccagccaatcctcctacaaacttcagcgcggcaaagtttgcttccttcatcacacagtattccacgggacaggtcagcgtggagatcgagtgggagctgcagaaggagaacagcaaacgctggaaccccgagatccagtacacttccaactacaacaaatctgttaatgtggactttactgtggacactaatggtgtgtattcagagcctcgccccattggcaccagatacctgactcgtaatctgtaa

SEQ ID NO: 4444 - DNA, 2208 bp, synthetic construct
  misc_feature 1..2208: note = source = /note="Description of Artificial Sequence: Synthetic polynucleotide"
  source 1..2208: mol_type = other DNA
atggctgccgatggttatcttccagattggctcgaggacactctccctgaaggaataagacagtggtggaagctcaaacctggcccaccaccaccaaagcccgcagagcggcatcaggacgacagcaggggtcttgtgcttcctgggtacaagtacctcggacccttcaacggactcgacaaaggagagccggtcaacgaggcagacgctgcggccctcgagcacgacaaggcctacgaccggcagctcgacagcggagacaacccgtacctcaagtacaaccacgccgacgcggagtttcaggagcgtcttaaagaagatacgtcttttgggggcaacctcggacgagcagtcttccaggcgaaaaagagggttcttgaacctctgggcctggttgaggaacctgttaagacggctccgggaaaaaagaggccggtagagcactctcctgcggagccagactcctcctcgggaaccggaaaagcgggccagcagcctgcaagaaagagattgaatttcggtcagactggagacgcagactccgtacctgacccccagcctctcggacagccaccagcagcccccacaagtttgggatctactacaatggctacaggcagtggcgcaccaatggcagacaataacgagggtgccgatggagtgggtaattcctcaggaaattggcattgcgattcccaatggctgggcgacagagtcatcaccaccagcacccgaacctgggccctgcccacctacaacaaccacctctacaagcaaatctccagccaatcaggagcatcgaacgacaaccactactttggctacagcaccccttgggggtattttgacttcaacagattccactgtcacttctccccacgtgactggcaaagactcatcaacaacaactggggattccgacccaagagactcaacttcaagctctttaacattcaagtcaaagaggtcacgcagaatgacggtacgacgacgattgccaataaccttaccagcacggttcaggtgtttactgactcggagtaccagctcccgtacgtcctcggctcggcgcatcaaggatgcctcccgccgtttccagcggacgtcttcatggtcccacagtatggatacctcaccctgaacaacgggagtcaggcggtaggacgctcttccttttactgcctggagtactttccttctcagatgctgcgtaccggaaacaactttaccttcagctacacctttgaggacgtgcctttccacagcagctacgctcacagccagagtttggaccggctgatgaatcctctgatcgaccagtatctgtattatctgaacaggacacaatcaaatagtggaactcttcagcagtctaggctactgtttagccaagctggacccaccagcatgtctcttcaagctaaaaactggctgcctggaccttgctacagacagcagcgtctgtcaaagcaggcaaacgacaacaacaacagcaactttccctggactgcggctacaaagtatcatctaaatggtcgggactcgttggttaatccaggaccagctatggccagccacaaagacgatgaagaaaagtttttccccatgcatggaaccctgatatttggtaaacaaggaacaaatgctaacgacgcggatttggaacatgtcatgattacagatgaagaagaaatcaggaccaccaatcccgtggctacagagcagtacggaaacgtgtcaaataatttgcaaaactcaaatactggtccaactacagaaaatgtcaatcaccagggagcgttacctggtatggtgtggcaggatcgagacgtgtacctgcagggacccatttgggccaagattcctcacaccgacggacactttcacccttctccactgatgggaggttttggactcaaacacccgcctcctcaaatcatgatcaaaaacactcctgttccagccaatcctcctacaaacttcagcgcggcaaagtttgcttccttcatcacacagtattccacgggacaggtcagcgtggagatcgagtgggagctgcagaaggagaacagcaaacgctggaaccccgagatccagtacacttccaactacaacaaatctgttaatgtggactttactgtggacactaatggtgtgtattcagagcctcgccccattggcaccagatacctgactcgtaatctgtaa

SEQ ID NO: 4445 - DNA, 2208 bp, synthetic construct
  misc_feature 1..2208: note = source = /note="Description of Artificial Sequence: Synthetic polynucleotide"
  source 1..2208: mol_type = other DNA
atggctgccgatggttatcttccagattggctcgaggacactctctctgaaggaataagacagtggtggaagctcaaacctggcccaccaccaccaaagcccgcagagcggcatcaggacgacagcaggggtcttgtgcttcctgggtacaagtacctcggacccttcaacggactcgacaaaggagagccggtcaacgaggcagacgctgcggccctcgagcacgacaaggcctacgaccggcagctcgacagcggagacaacccgtacctcaagtacaaccacgccgacgcggagtttcaggagcgtcttaaagaagatacgtcttttgggggcaacctcggacgagcagtcttccaggcgaaaaagagggttcttgaacctctgggcctggttgaggaacctgttaagacggctccgggaaaaaagaggccggtagagcactctcctgcggagccagactcctcctcgggaaccggaaaagcgggccagcagcctgcaagaaagagattgaatttcggtcagactggagacgcagactccgtacctgacccccagcctctcggacagccaccagcagcccccacaagtttgggatctactacaatggctacaggcagtggcgcaccaatggcagacaataacgagggtgccgatggagtgggtaattcctcaggaaattggcattgcgattcccaatggctgggcgacagagtcatcaccaccagcacccgaacctgggccctgcccacctacaacaaccacctctacaagcaaatctccagccaatcaggagcatcgaacgacaaccactactttggctacagcaccccttgggggtattttgacttcaacagattccactgtcacttctccccacgtgactggcaaagactcatcaacaacaactggggattccgacccaagagactcaacttcaagctctttaacattcaagtcaaagaggtcacgcagaatgacggtacgacgacgattgccaataaccttaccagcacggttcaggtgtttactgactcggagtaccagctcccgtacgtcctcggctcggcgcatcaaggatgcctcccgccgtttccagcggacgtcttcatggtcccacagtatggatacctcaccctgaacaacgggagtcaggcggtaggacgctcttccttttactgcctggagtactttccttctcagatgctgcgtaccggaaacaactttaccttcagctacacctttgaggacgtgcctttccacagcagctacgctcacagccagagtttggaccggctgatgaatcctctgatcgaccagtatctgtattatctgaacaggacacaatcaaatagtggaactcttcagcagtctaggctactgtttagccaagctggacccaccagcatgtctcttcaagctaaaaactggctgcctggaccttgctacagacggcagcgtctgtcaaagcaggcaaacgacaacaacaacagcaactttccctggactgcggctacaaagtatcatctaaatggtcgggactcgttggttaatccaggaccagctatggccagccacaaagacgatgaagaaaagtttttccccatgcatggaaccctgatatttggtaaacaaggaacaaatgctaacgacgcggatttggaacatgtcatgattacagatgaagaagaaatcaggaccaccaatcccgtggctacagagcagtacggaaacgtgtcaaataatttgcaaaactcaaatactggtccaactacagaaaatgtcaatcaccagggagcgttacctggtatggtgtggcaggatcgagacgtgtacctgcagggacccatttgggccaagattcctcacaccgacggacactttcacccttctccactgatgggaggttttggactcaaacacccgcctcctcaaatcatgatcaaaaacactcctgttccagccaatcctcctacaaacttcagcgcggcaaagtttgcttccttcatcacacagtattccacgggacaggtcagcgtggagatcgagtgggagctgcagaaggagaacagcaaacgctggaaccccgagatccagtacacttccaactacaacaaatctgttaatgtggactttactgtggacactaatggtgtgtattcagagcctcgccccattggcaccagatacctgactcgtaatctgtaa

SEQ ID NO: 4446 - DNA, 2208 bp, synthetic construct
  misc_feature 1..2208: note = source = /note="Description of Artificial Sequence: Synthetic polynucleotide"
  source 1..2208: mol_type = other DNA
atggctgccgatggttatcttccagattggctcgaggacactctctctgaaggaataagacagtggtggaagctcaaacctggcccaccaccaccaaagcccgcagagcggcatcaggacgacagcaggggtcttgtgcttcctgggtacaagtacctcggacccttcaacggactcgacaaaggagagccggtcaacgaggcagacgctgcggccctcgagcacgacaaggcctacgaccggcagctcgacagcggagacaacccgtacctcaagtacaaccacgccgacgcggagtttcaggagcgtcttaaagaagatacgtcttttgggggcaacctcggacgagcagtcttccaggcgaaaaagagggttcttgaacctctgggcctggttgaggaacctgttaagacggctccgggaaaaaagaggccggtagagcactctcctgcggagccagactcctcctcgggaaccggaaaagcgggccagcagcctgcaagaaagagattgaatttcggtcagactggagacgcagactccgtacctgacccccagcctctcggacagccaccagcagcccccacaagtttgggatctactacaatggctacaggcagtggcgcaccaatggcagacaataacgagggtgccgatggagtgggtaattcctcaggaaattggcattgcgattcccaatggctgggcgacagagtcatcaccaccagcacccgaacctgggccctgcccacctacaacaaccacctctacaagcaaatctccagccaatcaggagcatcgaacgacaaccactactttggctacagcaccccttgggggtattttgacttcaacagattccactgtcacttctccccacgtgactggcaaagactcatcaacaacaactggggattccgacccaagagactcaacttcaagctctttaacattcaagtcaaagaggtcacgcagaatgacggtacgacgacgattgccaataaccttaccagcacggttcaggtgtttactgactcggagtaccagctcccgtacgtcctcggctcggcgcatcaaggatgcctcccgccgtttccagcggacgtcttcatggtcccacagtatggatacctcaccctgaacaacgggagtcaggcggtaggacgctcttccttttactgcctggagtaccttccttctcagatgctgcgtaccggaaacaactttaccttcagctacacctttgaggacgtgcctttccacagcagctacgctcacagccagagtttggaccggctgatgaatcctctgatcgaccagtatctgtattatctgaacaggacacaatcaaatagtggaactcttcagcagtctaggctactgtttagccaagctggacccaccagcatgtctcttcaagctaaaaactggctgcctggaccttgctacagacagcagcgtctgtcaaagcaggcaaacgacaacaacaacagcaactttccctggactgcggctacaaagtatcatctaaatggtcgggactcgttggttaatccaggaccagctatggccagccacaaagacgatgaagaaaagtttttccccatgcatggaaccctgatatttggtaaacaaggaacaaatgctaacgacgcggatttggaacatgtcatgattacagatgaagaagaaatcaggaccaccaatcccgtggctacagagcagtacggaaacgtgtcaaataatttgcaaaactcaaatactggtccaactacagaaaatgtcaatcaccagggagcgttacctggtatggtgtggcaggatcgagacgtgtacctgcagggacccatttgggccaagattcctcacaccgacggacactttcacccttctccactgatgggaggttttggactcaaacacccgcctcctcaaatcatgatcaaaaacactcctgttccagccaatcctcctacaaacttcagcgcggcaaagtttgcttccttcatcacacagtattccacgggacaggtcagcgtggagatcgagtgggagctgcagaaggagaacagcaaacgctggaaccccgagatccagtacacttccaactacaacaaatctgttaatgtggactttactgtggacactaatggtgtgtattcagagcctcgccccattggcaccagatacctgactcgtaatctgtaa

SEQ ID NO: 4447 - DNA, 2208 bp, synthetic construct
  misc_feature 1..2208: note = source = /note="Description of Artificial Sequence: Synthetic polynucleotide"
  source 1..2208: mol_type = other DNA
atggctgccgatggttatcttccagattggctcgaggacactctctctgaaggaataagacagtggtggaagctcaaacctggcccaccaccaccaaagcccgcagagcggcatcaggacgacagcaggggtcttgtgcttcctgggtacaagtacctcggacccttcaacggactcgacaaaggagagccggtcaacgaggcagacgctgcggccctcgagcacgacaaggcctacgaccggcagctcgacagcggagacaacccgtacctcaagtacaaccacgccgacgcggagtttcaggagcgtcttaaagaagatacgtcttttgggggcaacctcggacgagcagtcttccaggcgaaaaagagggttcttgaacctctgggcctggttgaggaacctgttaagacggctccgggaaaaaagaggccggtagagcactctcctgcggagccagactcctcctcgggaaccggaaaagcgggccagcagcctgcaagaaagagattgaatttcggtcagactggagacgcagactccgtacctgacccccagcctctcggacagccaccagcagcccccacaagtttgggatctactacaatggctacaggcagtggcgcaccaatggcagacaataacgagggtgccgatggagtgggtaattcctcaggaaattggcattgcgattcccaatggctgggcgacagagtcatcaccaccagcacccgaacctgggccctgcccacctacaacaaccacctctacaagcaaatctccagccaatcaggagcatcgaacgacaaccactactttggctacagcaccccttgggggtattttgacttcaacagattccactgtcacttctccccacgtgactggcaaagactcatcaacaacaactggggattccgacccaagagactcaacttcaagctctttaacattcaagtcaaagaggtcacgcagaatgacggtacgacgacgattgccaataaccttaccagcacggttcaggtgtttactgactcggagtaccagctcccgtacgtcctcggctcggcgcatcaaggatgcctcccgccgtttccagcggacgtcttcatggtcccacagtatggatacctcaccctgaacaacgggagtcaggcggtaggacgctcttccttttactgcctggagtactttccttctcagatgctgcgtaccggaaacaactttaccttcagctacacctttgaggacgtgcctttccacagcagctacgctcacagccagagtttggaccggctgatgaatcctctgatcgaccagtatctgtattatctgaacaggacacaatcaaatagtggaactcttcagcagtctaggctactgtttagccaagctggacccaccagcatgtctcttcaagctaaaaactggctgcctggaccttgctacagacagcagcgtctgtcaaagcaggcaaacgacaacaacaacggcaactttccctggactgcggctacaaagtatcatctaaatggtcgggactcgttggttaatccaggaccagctatggccagccacaaagacgatgaagaaaagtttttccccatgcatggaaccctgatatttggtaaacaaggaacaaatgctaacgacgcggatttggaacatgtcatgattacagatgaagaagaaatcaggaccaccaatcccgtggctacagagcagtacggaaacgtgtcaaataatttgcaaaactcaaatactggtccaactacagaaaatgtcaatcaccagggagcgttacctggtatggtgtggcaggatcgagacgtgtacctgcagggacccatttgggccaagattcctcacaccgacggacactttcacccttctccactgatgggaggttttggactcaaacacccgcctcctcaaatcatgatcaaaaacactcctgttccagccaatcctcctacaaacttcagcgcggcaaagtttgcttccttcatcacacagtattccacgggacaggtcagcgtggagatcgagtgggagctgcagaaggagaacagcaaacgctggaaccccgagatccagtacacttccaactacaacaaatctgttaatgtggactttactgtggacactaatggtgtgtattcagagcctcgccccattggcaccagatacctgactcgtaatctgtaa

SEQ ID NO: 4448 - DNA, 2208 bp, synthetic construct
  misc_feature 1..2208: note = source = /note="Description of Artificial Sequence: Synthetic polynucleotide"
  source 1..2208: mol_type = other DNA
atggctgccgatggttatcttccagattggctcgaggacactctctctgaaggaataagacagtggtggaagctcaaacctggcccaccaccaccaaagcccgcagagcggcatcaggacgacagcaggggtcttgtgcttcctgggtacaagtacctcggacccttcaacggactcgacaaaggagagccggtcaacgaggcagacgctgcggccctcgagcacgacaaggcctacgaccggcagttcgacagcggagacaacccgtacctcaagtacaaccacgccgacgcggagtttcaggagcgtcttaaagaagatacgtcttttgggggcaacctcggacgagcagtcttccaggcgaaaaagagggttcttgaacctctgggcctggttgaggaacctgttaagacggctccgggaaaaaagaggccggtagagcactctcctgcggagccagactcctcctcgggaaccggaaaagcgggccagcagcctgcaagaaagagattgaatttcggtcagactggagacgcagactccgtacctgacccccagcctctcggacagccaccagcagcccccacaagtttgggatctactacaatggctacaggcagtggcgcaccaatggcagacaataacgagggtgccgatggagtgggtaattcctcaggaaattggcattgcgattcccaatggctgggcgacagagtcatcaccaccagcacccgaacctgggccctgcccacctacaacaaccacctctacaagcaaatctccagccaatcaggagcatcgaacgacaaccactactttggctacagcaccccttgggggtattttgacttcaacagattccactgtcacttctccccacgtgactggcaaagactcatcaacaacaactggggattccgacccaagagactcaacttcaagctctttaacattcaagtcaaagaggtcacgcagaatgacggtacgacgacgattgccaataaccttaccagcacggttcaggtgtttactgactcggagtaccagctcccgtacgtcctcggctcggcgcatcaaggatgcctcccgccgtttccagcggacgtcttcatggtcccacagtatggatacctcaccctgaacaacgggagtcaggcggtaggacgctcttccttttactgcctggagtactttccttctcagatgctgcgtaccggaaacaactttaccttcagctacacctttgaggacgtgcctttccacagcagctacgctcacagccagagtttggaccggctgatgaatcctctgatcgaccagtatctgtattatctgaacaggacacaatcaaatagtggaactcttcagcagtctaggctactgtttagccaagctggacccaccagcatgtctcttcaagctaaaaactggctgcctggaccttgctacagacagcagcgtctgtcaaagcaggcaaacgacaacaacaacagcaactttccctggactgcggctacaaagtatcatctaaatggtcgggactcgttggttaatccaggaccagctatggccagccacaaagacgatgaagaaaagtttttccccatgcatggaaccctgatatttggtaaacaaggaacaaatgctaacgacgcggatttggaacatgtcatgattacagatgaagaagaaatcaggaccaccaatcccgtggctacagagcagtacggaaacgtgtcaaataatttgcaaaactcaaatactggtccaactacagaaaatgtcaatcaccagggagcgttacctggtatggtgtggcaggatcgagacgtgtacctgcagggacccatttgggccaagattcctcacaccgacggacactttcacccttctccactgatgggaggttttggactcaaacacccgcctcctcaaatcatgatcaaaaacactcctgttccagccaatcctcctacaaacttcagcgcggcaaagtttgcttccttcatcacacagtattccacgggacaggtcagcgtggagatcgagtgggagctgcagaaggagaacagcaaacgctggaaccccgagatccagtacacttccaactacaacaaatctgttaatgtggactttactgtggacactaatggtgtgtattcagagcctcgccccattggcaccagatacctgactcgtaatctgtaa

SEQ ID NO: 4449 - DNA, 2208 bp, synthetic construct
  misc_feature 1..2208: note = source = /note="Description of Artificial Sequence: Synthetic polynucleotide"
  source 1..2208: mol_type = other DNA
atggctgccgatggttatcttccagattggctcgaggacactctctctgaaggaataagacagtggtggaagctcaaacctggcccaccaccaccaaagcccgcagagcggcatcaggacgacagcaggggtcttgtgcttcctgggtacaagtacctcggacccttcaacggactcgacaaaggagagccggtcaacgaggcagacgctgcggccctcgagcacgacaaggcctacgaccggcagctcgacagcggagacaacccgtacctcaagtacaaccacgccgacgcggagtttcaggagcgtcttaaagaagatacgtcttttgggggcaacctcggacgagcagtcttccaggcgaaaaagagggttcttgaacctctgggcctggttgaggaacctgttaagacggctccgggaaaaaagaggccggtagagcactctcctgcggagccagactcctcctcgggaaccggaaaagcgggccagcagcctgcaagaaagagattgaatttcggtcagactggagacgcagactccgtacctgacccccagcctctcggacagccaccagcagcccccacaagtttgggatctactacaatggctacaggcagtggcgcaccaatggcagacaataacgagggtgccgatggagtgggtaattcctcaggaaattggcattgcgattcccaatggctgggcgacagagtcatcaccaccagcacccgaacctgggccctgcccacctacaacaaccacctctacaagcaaatctccagccaatcaggagcatcgaacgacaaccactactttggctacagcaccccttgggggtattttgacttcaacagattccactgtcacttctccccacgtgaccggcaaagactcatcaacaacaactggggattccgacccaagagactcaacttcaagctctttaacattcaagtcaaagaggtcacgcagaatgacggtacgacgacgattgccaataaccttaccagcacggttcaggtgtttactgactcggagtaccagctcccgtacgtcctcggctcggcgcatcaaggatgcctcccgccgtttccagcggacgtcttcatggtcccacagtatggatacctcaccctgaacaacgggagtcaggcggtaggacgctcttccttttactgcctggagtactttccttctcagatgctgcgtaccggaaacaactttaccttcagctacacctttgaggacgtgcctttccacagcagctacgctcacagccagagtttggaccggctgatgaatcctctgatcgaccagtatctgtattatctgaacaggacacaatcaaatagtggaactcttcagcagtctaggctactgtttagccaagctggacccaccagcatgtctcttcaagctaaaaactggctgcctggaccttgctacagacagcagcgtctgtcaaagcaggcaaacgacaacaacaacagcaactttccctggactgcggctacaaagtatcatctaaatggtcgggactcgttggttaatccaggaccagctatggccagccacaaagacgatgaagaaaagtttttccccatgcatggaaccctgatatttggtaaacaaggaacaaatgctaacgacgcggatttggaacatgtcatgattacagatgaagaagaaatcaggaccaccaatcccgtggctacagagcagtacggaaacgtgtcaaataatttgcaaaactcaaatactggtccaactacagaaaatgtcaatcaccagggagcgttacctggtatggtgtggcaggatcgagacgtgtacctgcagggacccatttgggccaagattcctcacaccgacggacactttcacccttctccactgatgggaggttttggactcaaacacccgcctcctcaaatcatgatcaaaaacactcctgttccagccaatcctcctacaaacttcagcgcggcaaagtttgcttccttcatcacacagtattccacgggacaggtcagcgtggagatcgagtgggagctgcagaaggagaacagcaaacgctggaaccccgagatccagtacacttccaactacaacaaatctgttaatgtggactttactgtggacactaatggtgtgtattcagagcctcgccccattggcaccagatacctgactcgtaatctgtaa

SEQ ID NO: 4450 - DNA, 2208 bp, synthetic construct
  misc_feature 1..2208: note = source = /note="Description of Artificial Sequence: Synthetic polynucleotide"
  source 1..2208: mol_type = other DNA
atggctgccgatggttatcttccagattggctcgaggacactctctctgaaggaataagacagtggtggaagctcaaacctggcccaccaccaccaaagcccgcagagcggcatcaggacgacagcaggggtcttgtgcttcctgggtacaagtacctcggacccttcaacggactcgacaaaggagagccggtcaacgaggcagacgctgcggccctcgagcacgacaaggcctacgaccggcagctcgacagcggagacaacccgtacctcaagtacaaccacgccgacgcggagtttcaggagcgtcttaaagaagatacgtcttttgggggcaacctcggacgagcagtcttccaggcgaaaaagagggttcttgaacctctgggcctggttgaggaacctgttaagacggctccgggaaaaaagaggccggtagagcactctcctgcggagccagactcctcctcgggaaccggaaaagcgggccagcagcctgcaagaaagagattgaatttcggtcagactggagacgcagactccgtacctgacccccagcctctcggacagccaccagcagcccccacaagtttgggatctactacaatggctacaggcagtggcgcaccaatggcagacaataacgagggtgccgatggagtgggtaattcctcaggaaattggcattgcgattcccaatggctgggcgacagagtcatcaccaccagcacccgaacctgggccctgcccgcctacaacaaccacctctacaagcaaatctccagccaatcaggagcatcgaacgacaaccactactttggctacagcaccccttgggggtattttgacttcaacagattccactgtcacttctccccacgtgactggcaaagactcatcaacaacaactggggattccgacccaagagactcaacttcaagctctttaacattcaagtcaaagaggtcacgcagaatgacggtacgacgacgattgccaataaccttaccagcacggttcaggtgtttactgactcggagtaccagctcccgtacgtcctcggctcggcgcatcaaggatgcctcccgccgtttccagcggacgtcttcatggtcccacagtatggatacctcaccctgaacaacgggagtcaggcggtaggacgctcttccttttactgcctggagtactttccttctcagatgctgcgtaccggaaacaactttaccttcagctacacctttgaggacgtgcctttccacagcagctacgctcacagccagagtttggaccggctgatgaatcctctgatcgaccagtatctgtattatctgaacaggacacaatcaaatagtggaactcttcagcagtctaggctactgtttagccaagctggacccaccagcatgtctcttcaagctaaaaactggctgcctggaccttgctacagacagcagcgtctgtcaaagcaggcaaacgacaacaacaacagcaactttccctggactgcggctacaaagtatcatctaaatggtcgggactcgttggttaatccaggaccagctatggccagccacaaagacgatgaagaaaagtttttccccatgcatggaaccctgatatttggtaaacaaggaacaaatgctaacgacgcggatttggaacatgtcatgattacagatgaagaagaaatcaggaccaccaatcccgtggctacagagcagtacggaaacgtgtcaaataatttgcaaaactcaaatactggtccaactacagaaaatgtcaatcaccagggagcgttacctggtatggtgtggcaggatcgagacgtgtacctgcagggacccatttgggccaagattcctcacaccgacggacactttcacccttctccactgatgggaggttttggactcaaacacccgcctcctcaaatcatgatcaaaaacactcctgttccagccaatcctcctacaaacttcagcgcggcaaagtttgcttccttcatcacacagtattccacgggacaggtcagcgtggagatcgagtgggagctgcagaaggagaacagcaaacgctggaaccccgagatccagtacacttccaactacaacaaatctgttaatgtggactttactgtggacactaatggtgtgtattcagagcctcgccccattggcaccagatacctgactcgtaatctgtaa

SEQ ID NO: 4451 - DNA, 2205 bp, synthetic construct
  misc_feature 1..2205: note = source = /note="Description of Artificial Sequence: Synthetic polynucleotide"
  source 1..2205: mol_type = other DNA
atggctgccgatggttatcttccagattggctcgaggacactctctctgaaggaataagacagtggtggaagctcaaacctggcccaccaccaccaaagcccgcagagcggcatcaggacgacagcaggggtcttgtgcttcctgggtacaagtacctcggacccttcaacggactcgacaaaggagagccggtcaacgaggcagacgctgcggccctcgagcacgacaaggcctacgaccggcagctcgacagcggagacaacccgtacctcaagtacaaccacgccgacgcggagtttcaggagcgtcttaaagaagatacgtcttttgggggcaacctcggacgagcagtcttccaggcgaaaaagagggttcttgaacctctgggcctggttgaggaacctgttaagacggctccgggaaaaaagaggccggtagagcactctcctgcggagccagactcctcctcgggaaccggaaaagcgggccagcagcctgcaagaaagagattgaatttcggtcagactggagacgcagactccgtacctgacccccagcctctcggacagccaccagcagcccccacaagtttgggatctactacaatggctacaggcagtggcgcaccaatggcagacaataacgagggtgccgatggagtgggtaattcctcaggaaattggcattgcgattcccaatggctgggcgacagagtcatcaccaccagcacccgaacctgggccctgcccacctacaacaaccacctctacaagcaaatctccagccaatcaggagcatcgaacgacaaccactactttggctacagcaccccttgggggtattttgacttcaacagattccactgtcacttctccccacgtgactggcaaagactcatcaacaacaactggggattccgacccaagagactcaacttcaagctctttaacattcaagtcaaagaggtcacgcagaatgacggtacgacgacgattgccaataaccttaccagcacggttcaggtgtttactgactcggagtaccagctcccgtacgtcctcggctcggcgcatcaaggatgcctcccgccgtttccagcggacgccttcatggtcccacagtatggatacctcaccctgaacaacgggagtcaggcggtaggacgctcttccttttactgcctggagtactttccttctcagatgctgcgtaccggaaacaactttaccttcagctacacctttgaggacgtgcctttccacagcagctacgctcacagccagagtttggaccggctgatgaatcctctgatcgaccagtatctgtattatctgaacaggacacaatcaaatagtggaactcttcagcagtctaggctactgtttagccaagctggacccaccagcatgtctcttcaagctaaaaactggctgcctggaccttgctacagacagcagcgtctgtcaaagcaggcaaacgacaacaacagcaactttccctggactgcggctacaaagtatcatctaaatggtcgggactcgttggttaatccaggaccagctatggccagccacaaagacgatgaagaaaagtttttccccatgcatggaaccctgatatttggtaaacaaggaacaaatgctaacgacgcggatttggaacatgtcatgattacagatgaagaagaaatcaggaccaccaatcccgtggctacagagcagtacggaaacgtgtcaaataatttgcaaaactcaaatactggtccaactacagaaaatgtcaatcaccagggagcgttacctggtatggtgtggcaggatcgagacgtgtacctgcagggacccatttgggccaagattcctcacaccgacggacactttcacccttctccactgatgggaggttttggactcaaacacccgcctcctcaaatcatgatcaaaaacactcctgttccagccaatcctcctacaaacttcagcgcggcaaagtttgcttccttcatcacacagtattccacgggacaggtcagcgtggagatcgagtgggagctgcagaaggagaacagcaaacgctggaaccccgagatccagtacacttccaactacaacaaatctgttaatgtggactttactgtggacactaatggtgtgtattcagagcctcgccccattggcaccagatacctgactcgtaatctgtaa

SEQ ID NO: 4452 - DNA, 2208 bp, synthetic construct
  misc_feature 1..2208: note = source = /note="Description of Artificial Sequence: Synthetic polynucleotide"
  source 1..2208: mol_type = other DNA
atggctgccgatggttatcttccagattggctcgaggacactctctctgaaggaataagacagtggtggaagctcaaacctggcccaccaccaccaaagcccgcagagcggcatcaggacgacagcaggggtcttgtgcttcctgggtacaagtacctcggacccttcaacggactcgacaaaggagagccggtcaacgaggcagacgctgcggccctcgagcacgacaaggcctacgaccggcagctcgacagcggagacaacccgtacctcaagtacaaccacgccgacgcggagtttcaggagcgtcttaaagaagatacgtcttttgggggcaacctcggacgagcagtcttccaggcgaaaaagagggttcttgaacctctgggcctggttgaggaacctgttaagacggctccgggaaaaaagaggccggtagagcactctcctgcggagccagactcctcctcgggaaccggaaaagcgggccagcagcctgcaagaaagagattgaatttcggtcagactggagacgcagactccgtacctgacccccagcctctcggacagccaccagcagcccccacaagtttgggatctactacaatggctacaggcagtggcgcaccaatggcagacaataacgagggtgccgatggagtgggtaattcctcaggaaattggcattgcgattcccaatggctgggcgacagagtcatcaccaccagcacccgaacctgggccctgcccacctacaacaaccacctctacaagcaaatctccagccaatcaggagcatcgaacgacaaccactactttggctacagcaccccttgggggtattttgacttcaacagattccactgtcacttctccccacgtggctggcaaagactcatcaacaacaactggggattccgacccaagagactcaacttcaagctctttaacattcaagtcaaagaggtcacgcagaatgacggtacgacgacgattgccaataaccttaccagcacggttcaggtgtttactgactcggagtaccagctcccgtacgtcctcggctcggcgcatcaaggatgcctcccgccgtttccagcggacgtcttcatggtcccacagtatggatacctcaccctgaacaacgggagtcaggcggtaggacgctcttccttttactgcctggagtactttccttctcagatgctgcgtaccggaaacaactttaccttcagctacacctttgaggacgtgcctttccacagcagctacgctcacagccagagtttggaccggctgatgaatcctctgatcgaccagtatctgtattatctgaacaggacacaatcaaatagtggaactcttcagcagtctaggctactgtttagccaagctggacccaccagcatgtctcttcaagctaaaaactggctgcctggaccttgctacagacagcagcgtctgtcaaagcaggcaaacgacaacaacaacagcaactttccctggactgcggctacaaagtatcatctaaatggtcgggactcgttggttaatccaggaccagctatggccagccacaaagacgatgaagaaaagtttttccccatgcatggaaccctgatatttggtaaacaaggaacaaatgctaacgacgcggatttggaacatgtcatgattacagatgaagaagaaatcaggaccaccaatcccgtggctacagagcagtacggaaacgtgtcaaataatttgcaaaactcaaatactggtccaactacagaaaatgtcaatcaccagggagcgttacctggtatggtgtggcaggatcgagacgtgtacctgcagggacccatttgggccaagattcctcacaccgacggacactttcacccttctccactgatgggaggttttggactcaaacacccgcctcctcaaatcatgatcaaaaacactcctgttccagccaatcctcctacaaacttcagcgcggcaaagtttgcttccttcatcacacagtattccacgggacaggtcagcgtggagatcgagtgggagctgcagaaggagaacagcaaacgctggaaccccgagatccagtacacttccaactacaacaaatctgttaatgtggactttactgtggacactaatggtgtgtattcagagcctcgccccattggcaccagatacctgactcgtaatctgtaa

SEQ ID NO: 4453 - DNA, 2208 bp, synthetic construct
  misc_feature 1..2208: note = source = /note="Description of Artificial Sequence: Synthetic polynucleotide"
  source 1..2208: mol_type = other DNA
atggctgccgatggttatcttccagattggctcgaggacactctctctgaaggaataagacagtggtggaagctcaaacctggcccaccaccaccaaagcccgcagagcggcatcaggacgacagcaggggtcttgtgcttcctgggtacaagtacctcggacccttcaacggactcgacaaaggagagccggtcaacgaggcagacgctgcggccctcgagcacgacaaggcctacgaccggcagctcgacagcggagacaacccgtacctcaagtacaaccacgccgacgcggagtttcaggagcgtcttaaagaagatacgtcttttgggggcaacctcggacgagcagtcttccaggcgaaaaagagggttcttgaacctctgggcctggttgaggaacctgttaagacggctccgggaaaaaagaggccggtagagcactctcctgcggagccagactcctcctcgggaaccggaaaagcgggccagcagcctgcaagaaagagattgaatttcggtcagactggagacgcagactccgtacctgacccccagcctctcggacagccaccagcagcccccacaagtttgggatctactacaatggctacaggcagtggcgcaccaatggcagacaataacgagggtgccgatggagtgggtaattcctcaggaaattggcattgcgattcccaatggctgggcgacagagtcatcaccaccagcacccgaacctgggccctgcccacctacaacaaccacctctacaagcaaatctccagccaatcaggagcatcgaacgacaaccactactttggctacagcaccccttgggggtattttgacttcaacagattccactgtcacttctccccacgtgactggcaaagactcatcaacaacaactggggattccgacccaagagactcaacttcaagctctttaacattcaagtcaaagaggtcacgcagaatgacggtacgacgacgattgccaataaccttaccagcacggttcaggtgtttactgactcggagtaccagctcccgtacgtcctcggctcggcgcatcaaggatgcctcccgccgtttccagcggacgtcttcatggtcccacagtatggatacctcaccctgaacaacgggagtcaggcggtaggacgctcttccttttactgcctggagtactttccttctcagatgctgcgtaccggaaacaactttaccttcagctacacctttgaggacgtgcctttccacagcagctacgctcacagccagagtttggaccggctgatgaatcctctgatcgaccagtatctgtattatctgaacgggacacaatcaaatagtggaactcttcagcagtctaggctactgtttagccaagctggacccaccagcatgtctcttcaagctaaaaactggctgcctggaccttgctacagacagcagcgtctgtcaaagcaggcaaacgacaacaacaacagcaactttccctggactgcggctacaaagtatcatctaaatggtcgggactcgttggttaatccaggaccagctatggccagccacaaagacgatgaagaaaagtttttccccatgcatggaaccctgatatttggtaaacaaggaacaaatgctaacgacgcggatttggaacatgtcatgattacagatgaagaagaaatcaggaccaccaatcccgtggctacagagcagtacggaaacgtgtcaaataatttgcaaaactcaaatactggtccaactacagaaaatgtcaatcaccagggagcgttacctggtatggtgtggcaggatcgagacgtgtacctgcagggacccatttgggccaagattcctcacaccgacggacactttcacccttctccactgatgggaggttttggactcaaacacccgcctcctcaaatcatgatcaaaaacactcctgttccagccaatcctcctacaaacttcagcgcggcaaagtttgcttccttcatcacacagtattccacgggacaggtcagcgtggagatcgagtgggagctgcagaaggagaacagcaaacgctggaaccccgagatccagtacacttccaactacaacaaatctgttaatgtggactttactgtggacactaatggtgtgtattcagagcctcgccccattggcaccagatacctgactcgtaatctgtaa

SEQ ID NO: 4454 - DNA, 2208 bp, synthetic construct
  misc_feature 1..2208: note = source = /note="Description of Artificial Sequence: Synthetic polynucleotide"
  source 1..2208: mol_type = other DNA
atggctgccgatggttatcttccagattggctcgaggacactctctctgaaggaataagacagtggtggaagctcaaacctggcccaccaccaccaaagcccgcagagcggcatcaggacgacagcaggggtcttgtgcttcctgggtacaagtacctcggacccttcaacggactcgacaaaggagagccggtcaacgaggcagacgctgcggccctcgagcacgacaaggcctacgaccggcagctcgacagcggagacaacccgtacctcaagtacaaccacgccgacgcggagtttcaggagcgtcttaaagaagatacgtcttttgggggcaacctcggacgagcagtcttccaggcgaaaaagagggttcttgaacctctgggcctggttgaggaacctgttaagacggctccgggaaaaaagaggccggtagagcactctcctgcggagccagactcctcctcgggaaccggaaaagcgggccagcagcctgcaagaaagagattgaatttcggtcagactggagacgcagactccgtacctgacccccagcctctcggacagccaccagcagcccccacaagtttgggatctactacaatggctacaggcagtggcgcaccaatggcagacaataacgagggtgccgatggagtgggtaattcctcaggaaattggcattgcgattcccaatggctgggcgacagagtcatcaccaccagcacccgaacctgggccctgcccacctacaacaaccacctctacaagcaaatctccagccaatcaggagcatcgaacgacaaccactactttggctacagcaccccttgggggtattttgacttcaacagattccactgtcacctctccccacgtgactggcaaagactcatcaacaacaactggggattccgacccaagagactcaacttcaagctctttaacattcaagtcaaagaggtcacgcagaatgacggtacgacgacgattgccaataaccttaccagcacggttcaggtgtttactgactcggagtaccagctcccgtacgtcctcggctcggcgcatcaaggatgcctcccgccgtttccagcggacgtcttcatggtcccacagtatggatacctcaccctgaacaacgggagtcaggcggtaggacgctcttccttttactgcctggagtactttccttctcagatgctgcgtaccggaaacaactttaccttcagctacacctttgaggacgtgcctttccacagcagctacgctcacagccagagtttggaccggctgatgaatcctctgatcgaccagtatctgtattatctgaacaggacacaatcaaatagtggaactcttcagcagtctaggctactgtttagccaagctggacccaccagcatgtctcttcaagctaaaaactggctgcctggaccttgctacagacagcagcgtctgtcaaagcaggcaaacgacaacaacaacagcaactttccctggactgcggctacaaagtatcatctaaatggtcgggactcgttggttaatccaggaccagctatggccagccacaaagacgatgaagaaaagtttttccccatgcatggaaccctgatatttggtaaacaaggaacaaatgctaacgacgcggatttggaacatgtcatgattacagatgaagaagaaatcaggaccaccaatcccgtggctacagagcagtacggaaacgtgtcaaataatttgcaaaactcaaatactggtccaactacagaaaatgtcaatcaccagggagcgttacctggtatggtgtggcaggatcgagacgtgtacctgcagggacccatttgggccaagattcctcacaccgacggacactttcacccttctccactgatgggaggttttggactcaaacacccgcctcctcaaatcatgatcaaaaacactcctgttccagccaatcctcctacaaacttcagcgcggcaaagtttgcttccttcatcacacagtattccacgggacaggtcagcgtggagatcgagtgggagctgcagaaggagaacagcaaacgctggaaccccgagatccagtacacttccaactacaacaaatctgttaatgtggactttactgtggacactaatggtgtgtattcagagcctcgccccattggcaccagatacctgactcgtaatctgtaa

SEQ ID NO: 4455 - DNA, 2208 bp, synthetic construct
  misc_feature 1..2208: note = source = /note="Description of Artificial Sequence: Synthetic polynucleotide"
  source 1..2208: mol_type = other DNA
atggctgccgatggttatcttccagattggctcgaggacactctctctgaaggaataagacagtggtggaagctcaaacctggcccaccaccaccaaagcccgcagagcggcatcaggacgacagcaggggtcttgtgcttcctgggtacaagtacctcggacccttcaacggactcgacaaaggagagccggtcaacgaggcagacgctgcggccctcgggcacgacaaggcctacgaccggcagctcgacagcggagacaacccgtacctcaagtacaaccacgccgacgcggagtttcaggagcgtcttaaagaagatacgtcttttgggggcaacctcggacgagcagtcttccaggcgaaaaagagggttcttgaacctctgggcctggttgaggaacctgttaagacggctccgggaaaaaagaggccggtagagcactctcctgcggagccagactcctcctcgggaaccggaaaagcgggccagcagcctgcaagaaagagattgaatttcggtcagactggagacgcagactccgtacctgacccccagcctctcggacagccaccagcagcccccacaagtttgggatctactacaatggctacaggcagtggcgcaccaatggcagacaataacgagggtgccgatggagtgggtaattcctcaggaaattggcattgcgattcccaatggctgggcgacagagtcatcaccaccagcacccgaacctgggccctgcccacctacaacaaccacctctacaagcaaatctccagccaatcaggagcatcgaacgacgaccactactttggctacagcaccccttgggggtattttgacttcaacagattccactgtcacttctccccacgtgactggcaaagactcatcaacaacaactggggattccgacccaagagactcaacttcaagctctttaacattcaagtcaaagaggtcacgcagaatgacggtacgacgacgattgccaataaccttaccagcacggttcaggtgtttactgactcggagtaccagctcccgtacgtcctcggctcggcgcatcaaggatgcctcccgccgtttccagcggacgtcttcatggtcccacagtatggatacctcaccctgaacaacgggagtcaggcggtaggacgctcttccttttactgcctggagtactttccttctcagatgctgcgtaccggaaacaactttaccttcagctacacctttgaggacgtgcctttccacagcagctacgctcacagccagagtttggaccggctgatgaatcctctgatcgaccagtatctgtattatctgaacaggacacaatcaaatagtggaactcttcagcagtctaggctactgtttagccaagctggacccaccagcatgtctcttcaagctaaaaactggctgcctggaccttgctacagacagcagcgtctgtcaaagcaggcaaacgacaacaacaacagcaactttccctggactgcggctacaaagtatcatctaaatggtcgggactcgttggttaatccaggaccagctatggccagccacaaagacgatgaagaaaagtttttccccatgcatggaaccctgatatttggtaaacaaggaacaaatgctaacgacgcggatttggaacatgtcatgattacagatgaagaagaaatcaggaccaccaatcccgtggctacagagcagtacggaaacgtgtcaaataatttgcaaaactcaaatactggtccaactacagaaaatgtcaatcaccagggagcgttacctggtatggtgtggcaggatcgagacgtgtacctgcagggacccatttgggccaagattcctcacaccgacggacactttcacccttctccactgatgggaggttttggactcaaacacccgcctcctcaaatcatgatcaaaaacactcctgttccagccaatcctcctacaaacttcagcgcggcaaagtttgcttccttcatcacacagtattccacgggacaggtcagcgtggagatcgagtgggagctgcagaaggagaacagcaaacgctggaaccccgagatccagtacacttccaactacaacaaatctgttaatgtggactttactgtggacactaatggtgtgtattcagagcctcgccccattggcaccagatacctgactcgtaatctgtaa

SEQ ID NO: 4456 - DNA, 2208 bp, synthetic construct
  misc_feature 1..2208: note = source = /note="Description of Artificial Sequence: Synthetic polynucleotide"
  source 1..2208: mol_type = other DNA
atggctgccgatggttatcttccagattggctcgaggacactctctctgaaggaataagacagtggtggaagctcaaacctggcccaccaccaccaaagcccgcagagcggcatcaggacgacagcaggggtcttgtgcttcctgggtacaagtacctcggacccttcaacggactcgacaaaggagagccggtcaacgaggcagacgctgcggccctcgagcacgacaaggcctacgaccggcagctcgacagcggagacaacccgtacctcaagtacaaccacgccgacgcggagtttcaggagcgtcttaaagaagatacgtcttttgggggcaacctcggacgagcagtcttccaggcgaaaaagagggttcttgaacctctgggcctggttgaggaacctgttaagacggctccgggaaaaaagaggccggtagagcactctcctgcggagccagactcctcctcgggaaccggaaaagcgggccagcagcctgcaagaaagagattgaatttcggtcagactggagacgcagactccgtacctgacccccagcctctcggacagccaccagcagcccccacaagtttgggatctactacaatggctacaggcagtggcgcaccaatggcagacaataacgagggtgccgatggagtgggtaattcctcaggaaattggcattgcgattcccaatggctgggcgacagagtcatcaccaccagcacccgaacctgggccctgcccacctacaacaaccacctctacaagcaaatctccagccaatcaggagcatcgaacgacaaccactactttggctacagcaccccttgggggtattttgacttcaacagattccactgtcacttctccccacgtgactggcaaagactcatcaacaacaactggggattccgacccaagagactcaacttcaagctctttaacattcaagtcaaagaggtcacgcagaatgacggtacgacgacgattgccaataaccttaccagcacggttcaggtgtttactgactcggagtaccagctcccgtacgtcctcggctcggcgcatcaaggatgcctcccgccgtttccagcggacgtcttcatggtcccacagtatggatacctcaccctgaacaacgggagtcaggcggtaggacgctcttccttttactgcctggagtactttccttctcagatgctgcgtaccggaaacaactttaccttcagctacacctttgaggacgtgcctttccacagcagctacgctcacagccagagtttggaccggctgatgaatcctctgatcgaccagtatctgtattatctgaacaggacacaatcaaatagtggaactcttcagcagtctaggctactgtttagccaagctggacccaccagcatgtctcttcaagctaaaaactggctgcctggaccttgctacagacagcagcgtctgtcaaagcaggcaaacgacaacaacaacagcaactttccctggactgcggctacaaagtatcatctaaatggtcgggactcgttggttaatccaggaccagctatggccagccacaaagacgatgaagaaaagtttttccccatgcatggaaccctgatatttggtaaacaaggaacaaatgctaacgacgcggatttggaacatgtcatgattacagatgaagaagaaatcaggaccaccaatcccgtggctacagagcagtacggaaacgtgtcaaataatttgcaaaactcaaatactggtccaactacagaaaatgtcaatcaccagggagcgttacctggtatggtgtggcaggatcgagacgtgtacctgcagggacccatttgggccaagattcctcacaccgacggacactttcgcccttctccactgatgggaggttttggactcaaacacccgcctcctcaaatcatgatcaaaaacactcctgttccagccaatcctcctacaaacttcagcgcggcaaagtttgcttccttcatcacacagtattccacgggacaggtcagcgtggagatcgagtgggagctgcagaaggagaacagcaaacgctggaaccccgagatccagtacacttccaactacaacaaatctgttaatgtggactttactgtggacactaatggtgtgtattcagagcctcgccccattggcaccagatacctgactcgtaatctgtaa

SEQ ID NO: 4457 - DNA, 2208 bp, synthetic construct
  misc_feature 1..2208: note = source = /note="Description of Artificial Sequence: Synthetic polynucleotide"
  source 1..2208: mol_type = other DNA
atggctgccgatggttatcttccagattggctcgaggacactctctctgaaggaataagacagtggtggaagctcaaacctggcccaccaccaccaaagcccgcagagcggcatcaggacgacagcaggggtcttgtgcttcctgggtacaagtacctcggacccttcaacggactcgacaaaggagagccggtcaacgaggcagacgctgcggccctcgagcacgacaaggcctacgaccggcagctcgacagcggagacaacccgtacctcaagtacaaccacgccgacgcggagtttcaggagcgtcttaaagaagatacgtcttttgggggcaacctcggacgagcagtcttccaggcgaaaaagagggttcttgaacctctgggcctggttgaggaacctgttaagacggctccgggaaaaaagaggccggtagagcactctcctgcggagccagactcctcctcgggaaccggaaaagcgggccagcagcctgcaagaaagagattgaatttcggtcagactggagacgcagactccgtacctgacccccagcctctcggacagccaccagcagcccccacaagtttgggatctactacaatggctacaggcagtggcgcaccaatggcagacaataacgagggtgccgatggagtgggtaattcctcaggaaattggcattgcgattcccaatggctgggcgacagagtcatcaccaccagcacccgaacctgggccctgcccacctacaacaaccacctctacaagcaaatctccagccaatcaggagcatcgaacgacaaccactactttggctacagcaccccttgggggtattttgacttcaacagattccactgtcacttctccccacgtgactggcaaagactcatcaacaacaactggggattccgacccaagagactcaacttcaagctctttaacattcaagtcaaagaggtcacgcagaatgacggtacgacgacgattgccaataaccttaccagcacggttcaggtgtttactgactcggagtaccagctcccgtacgtcctcggctcggcgcatcaaggatgcctcccgccgtttccagcggacgtcttcatggtcccacagtatggatacctcaccctgaacaacgggagtcaggcggtaggacgctcttccttttactgcctggagtactttccttctcagatgctgcgtaccggaaacaactttaccttcagctacacctttgaggacgtgcctttccacagcagctacgctcacagccagagtttggaccggctgatgaatcctctgatcgaccagtatctgtattatctgaacaggacacaatcaaatagtggaactcttcagcagtctaggctactgtttagccaagctggacccaccagcatgtctcttcaagctaaaaactggctgcctggaccttgctacagacagcagcgtctgtcaaagcaggcaaacgacaacaacaacagcaactttccctggactgcggctacaaagtatcatctaaatggtcgggactcgttggttaatccaggaccagctatggccagccacaaagacgatgaagaaaagtttttccccatgcatggaaccctgatatttggtaaacaaggaacaaatgctaacgacgcggatttggaacatgtcatgattacagatgaagaagaaatcaggaccaccaatcccgtggctacagagcagtacggaaacgtgtcaaataatttgcaaaactcaaatactggtccaactacagaaaatgtcaatcaccagggagcgttacctggtatggtgtggcaggatcgagacgtgtacctgcagggacccatttgggccaagattcctcacaccgacggacactttcacccttctccactgatgggaggttttggactcaaacacccgcctcctcaaatcatgatcaaaaacactcctgttccagccaatcctcctacaaacttcagcgcggcaaagtctgcttccttcatcacacagtattccacgggacaggtcagcgtggagatcgagtgggagctgcagaaggagaacagcaaacgctggaaccccgagatccagtacacttccaactacaacaaatctgttaatgtggactttactgtggacactaatggtgtgtattcagagcctcgccccattggcaccagatacctgactcgtaatctgtaa

SEQ ID NO: 4458 - DNA, 2208 bp, synthetic construct
  misc_feature 1..2208: note = source = /note="Description of Artificial Sequence: Synthetic polynucleotide"
  source 1..2208: mol_type = other DNA
atggctgccgatggttatcttccagattggctcgaggacactctctctgaaggaataagacagtggtggaagctcaaacctggcccaccaccaccaaagcccgcagagcggcatcaggacgacagcaggggtcttgtgcttcctgggtacaagtacctcggacccttcaacggactcgacaaaggagagccggtcaacgaggcagacgctgcggccctcgagcacgacaaggcctacgaccggcagctcgacagcggagacaacccgtacctcaagtacaaccacgccgacgcggagtttcaggagcgtcttaaagaagatacgtcttttgggggcaacctcggacgagcagtcttccaggcgaaaaagagggttcttgaacctctgggcctggttgaggaacctgttaagacggctccgggaaaaaagaggccggtagagcactctcctgcggagccagactcctcctcgggaaccggaaaagcgggccagcagcctgcaagaaagagattgaatttcggtcagactggagacgcagactccgtacctgacccccagcctctcggacagccaccagcagcccccacaagtttgggatctactacaatggctacaggcagtggcgcaccaatggcagacaataacgagggtgccgatggagtgggtaattcctcaggaaattggcattgcgattcccaatggctgggcgacagagtcatcaccaccagcacccgaacctgggccctgcccacctacaacaaccacctctacaagcaaatctccagccaatcaggagcatcgaacgacaaccactactttggctacagcaccccttgggggtattttgacttcaacagattccactgtcacttctccccacgtgactggcaaagactcatcaacaacaactggggattccgacccaagagactcaacttcaagctctttaacattcaagtcaaaggggtcacgcagaatgacggtacgacgacgattgccaataaccttaccagcacggttcaggtgtttactgactcggagtaccagctcccgtacgtcctcggctcggcgcatcaaggatgcctcccgccgtttccagcggacgtcttcatggtcccacagtatggatacctcaccctgaacaacgggagtcaggcggtaggacgctcttccttttactgcctggagtactttccttctcagatgctgcgtaccggaaacaactttaccttcagctacacctttgaggacgtgcctttccacagcagctacgctcacagccagagtttggaccggctgatgaatcctctgatcgaccagtatctgtattatctgaacaggacacaatcaaatagtggaactcttcagcagtctaggctactgtttagccaagctggacccaccagcatgtctcttcaagctaaaaactggctgcctggaccttgctacagacagcagcgtctgtcaaagcaggcaaacgacaacaacaacagcaactttccctggactgcggctacaaagtatcatctaaatggtcgggactcgttggttaatccaggaccagctatggccagccacaaagacgatgaagaaaagtttttccccatgcatggaaccctgatatttggtaaacaaggaacaaatgctaacgacgcggatttggaacatgtcatgattacagatgaagaagaaatcaggaccaccaatcccgtggctacagagcagtacggaaacgtgtcaaataatttgcaaaactcaaatactggtccaactacagaaaatgtcaatcaccagggagcgttacctggtatggtgtggcaggatcgagacgtgtacctgcagggacccatttgggccaagattcctcacaccgacggacactttcacccttctccactgatgggaggttttggactcaaacacccgcctcctcaaatcatgatcaaaaacactcctgttccagccaatcctcctacaaacttcagcgcggcaaagtttgcttccttcatcacacagtattccacgggacaggtcagcgtggagatcgagtgggagctgcagaaggagaacagcaaacgctggaaccccgagatccagtacacttccaactacaacaaatctgttaatgtggactttactgtggacactaatggtgtgtattcagagcctcgccccattggcaccagatacctgactcgtaatctgtaa

SEQ ID NO: 4459 - DNA, 2208 bp, synthetic construct
  misc_feature 1..2208: note = source = /note="Description of Artificial Sequence: Synthetic polynucleotide"
  source 1..2208: mol_type = other DNA
atggctgccgatggttatcttccagattggctcgaggacactctctctgaaggaataagacagtggtggaagctcaaacctggcccaccaccaccaaagcccgcagagcggcatcaggacgacagcaggggtcttgtgcttcctgggtacaagtacctcggacccttcaacggactcgacaaaggagagccggtcaacgaggcagacgctgcggccctcgagcacgacaaggcctacgaccggcagctcgacagcggagacaacccgtacctcaagtacaaccacgccgacgcggagtttcaggagcgtcttaaagaagatacgtcttttgggggcaacctcggacgagcagtcttccaggcgaaaaagagggttcttgaacctctgggcctggttgaggaacctgttaagacggctccgggaaaaaagaggccggtagagcactctcctgcggagccagactcctcctcgggaaccggaaaagcgggccagcagcctgcaagaaagagattgaatttcggtcagactggagacgcagactccgtacctgacccccagcctctcggacagccaccagcagcccccacaagtttgggatctactacaatggctacaggcagtggcgcaccaatggcagacaataacgagggtgccgatggagtgggtaattcctcaggaaattggcattgcgattcccaatggctgggcgacagagtcatcaccaccagcacccgaacctgggccctgcccacctacaacaaccacctctacaagcaaatctccagccaatcaggagcatcgaacgacaaccactactttggctacagcaccccttgggggtattttgacttcaacagattccactgtcacttctccccacgtgactggcaaagactcatcaacaacaactggggattccgacccaagagactcaacttcaagctctttaacattcaagtcaaagaggtcacgcagaatgacggtacgacgacgattgccaataaccttaccagcacggttcaggtgtttactgactcggagtaccagctcccgtacgtcctcggctcggcgcatcaaggatgcctcccgccgtttccagcggacgtcttcatggtcccacagtatggatacctcaccctgaacaacgggagtcaggcggtaggacgctcttccttttactgcctggagtactttccttctcagatgctgcgtaccggaaacaactttaccttcagctacacctttgaggacgtgcctttccacagcagctacgctcacagccagagtttggaccggctgatgaatcctctgatcgaccagtatctgtattatctgaacaggacacaatcaaatagtggaactcttcagcagtctaggctactgtttagccaagctggacccaccagcatgtctcttcaagctaaaaactggctgcctggaccttgctacagacagcagcgtctgtcaaagcaggcaaacgacaacaacaacagcaactttccctggactgcggctacaaagtatcatctaaatggtcgggactcgttggttaatccaggaccagctatggccagccacaaagacgatgaagaaaagtttttccccatgcatggaaccccgatatttggtaaacaaggaacaaatgctaacgacgcggatttggaacatgtcatgattacagatgaagaagaaatcaggaccaccaatcccgtggctacagagcagtacggaaacgtgtcaaataatttgcaaaactcaaatactggtccaactacagaaaatgtcaatcaccagggagcgttacctggtatggtgtggcaggatcgagacgtgtacctgcagggacccatttgggccaagattcctcacaccgacggacactttcacccttctccactgatgggaggttttggactcaaacacccgcctcctcaaatcatgatcaaaaacactcctgttccagccaatcctcctacaaacttcagcgcggcaaagtttgcttccttcatcacacagtattccacgggacaggtcagcgtggagatcgagtgggagctgcagaaggagaacagcaaacgctggaaccccgagatccagtacacttccaactacaacaaatctgttaatgtggactttactgtggacactaatggtgtgtattcagagcctcgccccattggcaccagatacctgactcgtaatctgtaa

SEQ ID NO: 4460 - DNA, 2208 bp, synthetic construct
  misc_feature 1..2208: note = source = /note="Description of Artificial Sequence: Synthetic polynucleotide"
  source 1..2208: mol_type = other DNA
atggctgccgatggttatcttccagattggctcgaggacactctctctgaaggaataagacagtggtggaagctcaaacctggcccaccaccaccaaagcccgcagagcggcatcaggacgacagcaggggtcttgtgcttcctgggtacaagtacctcggacccttcaacggactcgacaaaggagagccggtcaacgaggcagacgctgcggccctcgagcacgacaaggcctacgaccggcagctcgacagcggagacaacccgtacctcaagtacaaccacgccgacgcggagtttcaggagcgtcttaaagaagatacgtcttttgggggcaacctcggacgagcagtcttccaggcgaaaaagggggttcttgaacctctgggcctggttgaggaacctgttaagacggctccgggaaaaaagaggccggtagagcactctcctgcggagccagactcctcctcgggaaccggaaaagcgggccagcagcctgcaagaaagagattgaatttcggtcagactggagacgcagactccgtacctgacccccagcctctcggacagccaccagcagcccccacaagtttgggatctactacaatggctacaggcagtggcgcaccaatggcagacaataacgagggtgccgatggagtgggtaattcctcaggaaattggcattgcgattcccaatggctgggcgacagagtcatcaccaccagcacccgaacctgggccctgcccacctacaacaaccacctctacaagcaaatctccagccaatcaggagcatcgaacgacaaccactactttggctacagcaccccttgggggtattttgacttcaacagattccactgtcacttctccccacgtgactggcaaagactcatcaacaacaactggggattccgacccaagagactcaacttcaagctctttaacattcaagtcaaagaggtcacgcagaatgacggtacgacgacgattgccaataaccttaccagcacggttcaggtgtttactgactcggagtaccagctcccgtacgtcctcggctcggcgcatcaaggatgcctcccgccgtttccagcggacgtcttcatggtcccacagtatggatacctcaccctgaacaacgggagtcaggcggtaggacgctcttccttttactgcctggagtactttccttctcagatgctgcgtaccggaaacaactttaccttcagctacacctttgaggacgtgcctttccacagcagctacgctcacagccagagtttggaccggctgatgaatcctctgatcgaccagtatctgtattatctgaacaggacacaatcaaatagtggaactcttcagcagtctaggctactgtttagccaagctggacccaccagcatgtctcttcaagctaaaaactggctgcctggaccttgctacagacagcagcgtctgtcaaagcaggcaaacgacaacaacaacagcaactttccctggactgcggctacaaagtatcatctaaatggtcgggactcgttggttaatccaggaccagctatggccagccacaaagacgatgaagaaaagtttttccccatgcatggaaccctgatatttggtaaacaaggaacaaatgctaacgacgcggatttggaacatgtcatgattacagatgaagaagaaatcaggaccaccaatcccgtggctacagagcagtacggaaacgtgtcaaataatttgcaaaactcaaatactggtccaactacagaaaatgtcaatcaccagggagcgttacctggtatggtgtggcaggatcgagacgtgtacctgcagggacccatttgggccaagattcctcacaccgacggacactttcacccttctccactgatgggaggttttggactcaaacacccgcctcctcaaatcatgatcaaaaacactcctgttccagccaatcctcctacaaacttcagcgcggcaaagtttgcttccttcatcacacagtattccacgggacaggtcagcgtggagatcgagtgggagctgcagaaggagaacagcaaacgctggaaccccgagatccagtacacttccaactacaacaaatctgttaatgtggactttactgtggacactaatggtgtgtattcagagcctcgccccattggcaccagatacctgactcgtaatctgtaa

SEQ ID NO: 4461 - DNA, 2208 bp, synthetic construct
  misc_feature 1..2208: note = source = /note="Description of Artificial Sequence: Synthetic polynucleotide"
  source 1..2208: mol_type = other DNA
atggctgccgatggttatcttccagattggctcgaggacactctctctgaaggaataagacagtggtggaagctcaaacctggcccaccaccaccaaagcccgcagagcggcatcaggacgacagcaggggtcttgtgcttcctgggtacaagtacctcggacccttcaacggactcgacaaaggagagccggtcaacgaggcagacgctgcggccctcgagcacgacaaggcctacgaccggcagctcgacagcggagacaacccgtacctcaagtacaaccacgccgacgcggagtttcaggagcgtcttaaagaagatacgtcttttgggggcaacctcggacgagcagtcttccaggcgaaaaagagggttcttgaacctctgggcctggttgaggaacctgttaagacggctccgggaaaaaagaggccggtagagcactctcctgcggagccagactcctcctcgggaaccggaaaagcgggccagcagcctgcaagaaagagattgaatttcggtcagactggagacgcagactccgtacctgacccccagcctctcggacagccaccagcagcccccacaagtttgggatctactacaatggctacaggcagtggcgcaccaatggcagacaataacgagggtgccgatggagtgggtaattcctcaggaaattggcattgcgattcccaatggctgggcgacagagtcatcaccaccagcacccgaacctgggccctgcccacctacaacaaccacctctacaagcaaatctccagccaatcaggagcatcgaacgacaaccactactttggctacagcaccccttgggggtattttgacttcaacagattccactgtcacttctccccacgtgactggcaaagactcatcaacaacaactggggattccgacccaagagactcaacttcaagctctttaacattcaagtcaaagaggtcacgcagaatgacggtacgacgacgattgccaataaccttaccagcacggttcaggtgtttactgactcggagtaccagctcccgtacgtcctcggctcggcgcatcaaggatgcctcccgccgtttccagcggacgtcttcatggtcccacagtatggatacctcaccctgaacaacgggagtcaggcggtaggacgctcttccttttactgcctggagtactttccttctcagatgctgcgtaccggaaacaactttaccttcagctacacctttgaggacgtgcctttccacagcagctacgctcacagccagagtttggaccggctgatgaatcctctgatcggccagtatctgtattatctgaacaggacacaatcaaatagtggaactcttcagcagtctaggctactgtttagccaagctggacccaccagcatgtctcttcaagctaaaaactggctgcctggaccttgctacagacagcagcgtctgccaaagcaggcaaacgacaacaacaacagcaactttccctggactgcggctacaaagtatcatctaaatggtcgggactcgttggttaatccaggaccagctatggccagccacaaagacgatgaagaaaagtttttccccatgcatggaaccctgatatttggtaaacaaggaacaaatgctaacgacgcggatttggaacatgtcatgattacagatgaagaagaaatcaggaccaccaatcccgtggctacagagcagtacggaaacgtgtcaaataatttgcaaaactcaaatactggtccaactacagaaaatgtcaatcaccagggagcgttacctggtatggtgtggcaggatcgagacgtgtacctgcagggacccatttgggccaagattcctcacaccgacggacactttcacccttctccactgatgggaggttttggactcaaacacccgcctcctcaaatcatgatcaaaaacactcctgttccagccaatcctcctacaaacttcagcgcggcaaagtttgcttccttcatcacacagtattccacgggacaggtcagcgtggagatcgagtgggagctgcagaaggagaacagcaaacgctggaaccccgagatccagtacacttccaactacaacaaatctgttaatgtggactttactgtggacactaatggtgtgtattcagagcctcgccccattggcaccagatacctgactcgtaatctgtaa

SEQ ID NO: 4462 - DNA, 2208 bp, synthetic construct
  misc_feature 1..2208: note = source = /note="Description of Artificial Sequence: Synthetic polynucleotide"
  source 1..2208: mol_type = other DNA
atggctgccgatggttatcttccagattggctcgaggacactctctctgaaggaataagacagtggtggaagctcaaacctggcccaccaccaccaaagcccgcagagcggcatcaggacgacagcaggggtcttgtgcttcctgggtacaagtacctcggacccttcaacggactcgacaaaggagagccggtcaacgaggcagacgctgcggccctcgagcacgacaaggcctacgaccggcagctcgacagcggagacaacccgtacctcaagtacaaccacgccgacgcggagtttcaggagcgtcttaaagaagatacgtcttttgggggcaacctcggacgagcagtcttccaggcgaaaaagagggttcttgaacctctgggcctggttgaggaacctgttaagacggctccgggaaaaaagaggccggtagagcactctcctgcggagccagactcctcctcgggaaccggaaaagcgggccagcagcctgcaagaaagagattgaatttcggtcagactggagacgcagactccgtacctgacccccagcctctcggacagccaccagcagcccccacaagtttgggatctactacaatggctacaggcagtggcgcaccaatggcagacaataacgagggtgccgatggagtgggtaattcctcaggaaattggcattgcgattcccaatggctgggcgacagagtcatcaccaccagcacccgaacctgggccctgcccacctacaacaaccacctctacaagcaaatctccagccaatcaggagcatcgaacgacaaccactactttggctacagcaccccttgggggtattttgacttcaacagattccactgtcacttctccccacgtgactggcaaagactcatcaacaacaactggggattccgacccaagagactcaacttcaagctctttaacattcaagtcaaagaggtcacgcagaatgacggtacgacgacgattgccaataaccttaccagcacggttcaggtgtttactgactcggagtaccagctcccgtacgtcctcggctcggcgcatcaaggatgcctcccgccgtttccagcggacgtcttcatggtcccacagtatggatacctcaccctgaacaacgggagtcaggcggtaggacgctcttccttttactgcctggagtactttccttctcagatgctgcgtaccggaaacaactttaccttcagctacacctttgaggacgtgcctttccacagcagctacgctcacagccagagtttggaccggctgatgaatcctctgatcgaccagtatctgtattatctgaacaggacacaatcaaatagtggaactcttcagcagtctaggctactgtttagccaagctggacccaccagcatgtctcttcaagctaaaaactggctgcctggaccttgctacagacagcagcgtctgtcaaagcaggcaaacgacaacaacaacagcaactttccctggactgcggctacaaagtatcatctaaatggtcgggactcgttggttaatccaggaccagctatggccagccacaaagacgatgaagaaaagtttttccccatgcatggaaccctgatatttggtaaacaaggaacaaatgctaacgacgcggatttggaacatgtcatgattacagatgaagaagaaatcaggaccaccaatcccgtggctacagagcagtacggaaacgtgtcaaataatttgcaaaactcaaatactggtccaactacagaaaatgtcaatcaccagggagcgttacctggtatggtgtggcaggatcgagacgtgtacctgcagggacccatttgggccaagattcctcacaccgacggacgctttcacccttctccactgatgggaggttttggactcaaacacccgcctcctcaaatcatgatcaaaaacactcctgttccagccaatcctcctacaaacttcagcgcggcaaagtttgcttccttcatcacacagtattccacgggacaggtcagcgtggagatcgagtgggagctgcagaaggagaacagcaaacgctggaaccccgagatccagtacacttccaactacaacaaatctgttaatgtggactttactgtggacactaatggtgtgtattcagagcctcgccccattggcaccagatacctgactcgtaatctgtaa

SEQ ID NO: 4463 - DNA, 2208 bp, synthetic construct
  misc_feature 1..2208: note = source = /note="Description of Artificial Sequence: Synthetic polynucleotide"
  source 1..2208: mol_type = other DNA
atggctgccgatggttatcttccagattggctcgaggacactctctctgaaggaataagacagtggtggaagctcaaacctggcccaccaccaccaaagcccgcagagcggcatcaggacgacagcaggggtcttgtgcttcctgggtacaagtacctcggacccttcaacggactcgacaaaggagagccggtcaacgaggcagacgctgcggccctcgagcacgacaaggcctacgaccggcagctcgacagcggagacaacccgtacctcaagtacaaccacgccgacgcggagtttcaggagcgtcttaaagaagatacgtcttttgggggcaacctcggacgagcagtcttccaggcgaaaaagagggttcttgaacctctgggcctggttgaggaacctgttaagacggctccgggaaaaaagaggccggtagagcactctcctgcggagccagactcctcctcgggaaccggaaaagcgggccagcagcctgcaagaaagagattgaatttcggtcagactggagacgcagactccgtacctgacccccagcctctcggacagccaccagcagcccccacaagtttgggatctactacaatggctacaggcagtggcgcaccaatggcagacaataacgagggtgccgatggagtgggtaattcctcaggaaattggcattgcgattcccaatggctgggcgacagagtcatcaccaccagcacccgaacctgggccctgcccacctacaacaaccacctctacaagcaaatctccagccaatcaggagcatcgaacgacaaccactactttggctacagcaccccttgggggtattttgacttcaacagattccactgtcacttctccccacgtgactggcaaagactcatcaacaacaactggggattccgacccaagagactcaacttcaagctctttaacattcaagtcaaagaggtcacgcagaatgacggtacgacgacgattgccaataaccttaccagcacggttcaggtgtttactgactcggagtaccagctcccgtacgtcctcggctcggcgcatcaaggatgcctcccgccgtttccagcggacgtcttcatggtcccacagtatggatacctcaccctgaacaacgggagtcaggcggtaggacgctcttccttttactgcctggagtactttccttctcagatgctgcgtaccggaaacaactttaccttcagctacacctttgaggacgtgcctttccacagcagctacgctcacagccagagtttggaccggctgatgaatcctctgatcgaccagtatctgtattatctgaacaggacacaatcaaatagtggaactcttcagcagtctaggctactgtttagccaagctggacccaccagcatgtctcttcaagctaaaaactggctgcctggaccttgctacagacagcagcgtctgtcaaagcaggcaaacgacaacaacaacagcaactttccctggactgcggctacaaagtatcatctaaatggtcgggactcgttggttaatccaggaccagctatggccagccacaaagacgatgaagaaaagtttttccccatgcatggagccctgatatttggtaaacaaggaacaaatgctaacgacgcggatttggaacatgtcatgattacagatgaagaagaaatcaggaccaccaatcccgtggctacagagcagtacggaaacgtgtcaaataatttgcaaaactcaaatactggtccaactacagaaaatgtcaatcaccagggagcgttacctggtatggtgtggcaggatcgagacgtgtacctgcagggacccatttgggccaagattcctcacaccgacggacactttcacccttctccactgatgggaggttttggactcaaacacccgcctcctcaaatcatgatcaaaaacactcctgttccagccaatcctcctacaaacttcagcgcggcaaagtttgcttccttcatcacacagtattccacgggacaggtcagcgtggagatcgagtgggagctgcagaaggagaacagcaaacgctggaaccccgagatccagtacacttccaactacaacaaatctgttaatgtggactttactgtggacactaatggtgtgtattcagagcctcgccccattggcaccagatacctgactcgtaatctgtaa

SEQ ID NO: 4464 - DNA, 2208 bp, synthetic construct
  misc_feature 1..2208: note = source = /note="Description of Artificial Sequence: Synthetic polynucleotide"
  source 1..2208: mol_type = other DNA
atggctgccgatggttatcttccagattggctcgaggacactctctctgaaggaataagacagtggtggaagctcaaacctggcccaccaccaccaaagcccgcagagcggcatcaggacgacagcaggggtcttgtgcttcctgggtacaagtacctcggacccttcaacggactcgacaaaggagagccggtcaacgaggcagacgctgcggccctcgagcacgacaaggcctacgaccggcagctcgacagcggagacaacccgtacctcaagtacaaccacgccgacgcggagtttcaggagcgtcttaaagaagatacgtcttttgggggcaacctcggacgagcagtcttccaggcgaaaaagagggttcttgaacctctgggcctggttgaggaacctgttaagacggctccgggaaaaaagaggccggtagagcactctcctgcggagccagactcctcctcgggaaccggaaaagcgggccagcagcctgcaagaaagagattgaatttcggtcagactggagacgcagactccgtacctgacccccagcctctcggacagccaccagcagcccccacaagtttgggatctactacaatggctacaggcagtggcgcaccaatggcagacaataacgagggtgccgatggagtgggtaattcctcaggaaattggcattgcgattcccaatggctgggcgacagagtcatcaccaccagcacccgaacctgggccctgcccacctacaacaaccacctctacaagcaaatctccagccaatcaggagcatcgaacgacaaccactactttggctacagcaccccttgggggtattttgacttcaacagattccactgtcacttctccccacgtgactggcaaagactcatcaacaacaactggggattccgacccaagagactcaacttcaagctctttaacattcaagtcaaagaggtcacgcagaatgacggtacgacgacgattgccaataaccttaccagcacggttcaggtgtttactgactcggagtaccagctcccgtacgtcctcggctcggcgcatcaaggatgcctcccgccgtttccagcggacgtcttcatggtcccacagtatggatacctcaccctgaacaacgggagtcaggcggtaggacgctcttccttttactgcctggagtactttccttctcagatgctgcgtaccggaaacaactttaccttcagctacacctttgaggacgtgcctttccacagcagctacgctcacagccagagtttggaccggctgatgaatcctctgatcgaccagtatctgtattatctgaacaggacacaatcaaatagtggaactcttcagcagtctaggctactgtttagccaagctggacccaccagcatgtctcttcaagctaaaaactggctgcctggaccttgctacagacagcagcgtctgtcaaagcaggcaaacgacaacaacaacagcaactttccctggactgcggctacaaagtatcatctaaatggtcgggactcgttggttaatccaggaccagctatggccagccacaaagacgatgaagaaaagtttttccccatgcatggaaccctgatatttggtaaacaaggaacaaatgctaacgacgcggatttggaacatgccatgattacagatgaagaagaaatcaggaccaccaatcccgtggctacagagcagtacggaaacgtgtcaaataatttgcaaaactcaaatactggtccaactacagaaaatgtcaatcaccagggagcgttacctggtatggtgtggcaggatcgagacgtgtacctgcagggacccatttgggccaagattcctcacaccgacggacactttcacccttctccactgatgggaggttttggactcaaacacccgcctcctcaaatcatgatcaaaaacactcctgttccagccaatcctcctacaaacttcagcgcggcaaagtttgcttccttcatcacacagtattccacgggacaggtcagcgtggagatcgagtgggagctgcagaaggagaacagcaaacgctggaaccccgagatccagtacacttccaactacaacaaatctgttaatgtggactttactgtggacactaatggtgtgtattcagagcctcgccccattggcaccagatacctgactcgtaatctgtaa

SEQ ID NO: 4465 - DNA, 2208 bp, synthetic construct
  misc_feature 1..2208: note = source = /note="Description of Artificial Sequence: Synthetic polynucleotide"
  source 1..2208: mol_type = other DNA
atggctgccgatggttatcttccagattggctcgaggacactctctctgaaggaataagacagtggtggaagctcaaacctggcccaccaccaccaaagcccgcagagcggcatcaggacgacagcaggggtcttgtgcttcctgggtacaagtacctcggacccttcaacggactcgacaaaggagagccggtcaacgaggcagacgctgcggccctcgagcacgacaaggcctacgaccggcagctcgacagcggagacaacccgtacctcaagtacaaccacgccgacgcggagtttcaggagcgtcttaaagaagatacgtcttttgggggcaacctcggacgagcagtcttccaggcgaaaaagagggttcttgaacctctgggcctggttgaggaacctgttaagacggctccgggaaaaaagaggccggtagagcactctcctgcggagccagactcctcctcgggaaccggaaaagcgggccagcagcctgcaagaaagagattgaatttcggtcagactggagacgcagactccgtacctgacccccagcctctcggacagccaccagcagcccccacaagtttgggatctactacaatggctacaggcagtggcgcaccaatggcagacaataacgagggtgccgatggagtgggtaattcctcaggaaattggcattgcgattcccaatggctgggcgacagagtcatcaccaccagcacccgaacctgggccctgcccacctacaacaaccacctctacaagcaaatctccagccaatcaggagcatcgaacgacaaccactactttggctacagcaccccttgggggtattttgacttcaacagattccactgtcacttctccccacgtgactggcaaagactcatcaacaacaactggggattccgacccaagagactcaacttcaagctctttaacattcaagtcaaagaggtcacgcagaatgacggtacgacgacgattgccaataaccttaccagcacggttcaggtgtttactgactcggagtaccagctcccgtacgtcctcggctcggcgcatcaaggatgcctcccgccgtttccagcggacgtcttcatggtcccacagtatggatacctcaccctgaacaacgggagtcaggcggtaggacgctcttccttttactgcctggagtactttccttctcagatgctgcgtaccggaaacaactttaccttcagctacacctttgaggacgtgcctttccacagcagctacgctcacagccagagtttggaccggctgatgaatcctctgatcgaccagtatctgtattatctgaacaggacacaatcaaatagtggaactcttcagcagtctaggctactgtttagccaagctggacccaccagcatgtctcttcaagctaaaaactggctgcctggaccttgctacagacagcagcgtctgtcaaagcaggcaaacgacaacaacaacagcaactttccctggactgcggctacaaagtatcatctaaatggtcgggactcgttggttaatccaggaccagctatggccagccacaaagacgatgaagaaaagtttttccccatgcatggaaccctgatatttggtaaacaaggaacaaatgctaacgacgcggatttggaacatgtcatgattacagatgaagaagaaatcaggaccaccaatcccgtggctacagagcagtacggaaacgtgtcaaataatttgcaaaactcaaatactggtccaactacagaaaatgtcaatcaccagggagcgttacctggtatggtgtggcaggatcgagacgtgtacctgcagggacccatttgggccaagattcctcacaccgacggacactttcacccttctccactgatgggaggttttggactcaaacacccgcctcctcaaatcatgatcaaaaacactcctgttccagccaatcctcctacaaacttcagcgcggcaaagtttgcttccttcatcacacagtattccacgggacaggtcagcgtggagatcgagtgggagctgcagaaggagaacagcaaacgctggaaccccgagatccggtacacttccaactacaacaaatctgttaatgtggactttactgtggacactaatggtgtgtattcagagcctcgccccattggcaccagatacctgactcgtaatctgtaa

SEQ ID NO: 4466 - DNA, 2208 bp, synthetic construct
  misc_feature 1..2208: note = source = /note="Description of Artificial Sequence: Synthetic polynucleotide"
  source 1..2208: mol_type = other DNA
atggctgccgatggttatcttccagattggctcgaggacactctctctgaaggaataagacagtggtggaagctcaaacctggcccaccaccaccaaagcccgcagagcggcatcaggacgacagcaggggtcttgtgcttcctgggtacaagtacctcggacccttcaacggactcgacaaaggagagccggtcaacgaggcagacgctgcggccctcgagcacgacaaggcctacgaccggcagctcgacagcggagacaacccgtacctcaagtacaaccacgccgacgcggagtttcaggagcgtcttaaagaagatacgtcttttgggggcaacctcggacgagcagtcttccaggcgaaaaagagggttcttgaacctctgggcctggttgaggaacctgttaagacggctccgggaaaaaagaggccggtagagcactctcctgcggagccagactcctcctcgggaaccggaaaagcgggccagcagcctgcaagaaagagattgaatttcggtcagactggagacgcagactccgtacctgacccccagcctctcggacagccaccagcagcccccacaagtttgggatctactacaatggctacaggcagtggcgcaccaatggcagacaataacgagggtgccgatggagtgggtaattcctcaggaaattggcattgcgattcccaatggctgggcgacagagtcatcaccaccagcacccgaacctgggccctgcccacctacaacaaccacctctacaagcaaatctccagccaatcaggagcatcgaacgacaaccactactttggctacagcaccccttgggggtattttgacttcaacagattccactgtcacttctccccacgtgactggcaaagactcatcaacaacaactggggattccgacccaagagactcaacttcaagctctttaacattcaagtcaaagaggtcacgcagaatgacggtacgacgacgattgccaataaccttaccagcacggttcaggtgtttactgactcggagtaccagctcccgtacgtcctcggctcggcgcatcaaggatgcctcccgccgtttccagcggacgtcttcatggtcccacagtatggatacctcaccctgaacaacgggagtcaggcggtaggacgctcttccttttactgcctggagtactttccttctcagatgctgcgtaccggaaacaactttaccttcagctacacctttgaggacgtgcctttccacagcagctacgctcacagccagagtttggaccggctgatgaatcctctgatcgaccagtatctgtattatctgaacaggacacaatcaaatagtggaactcttcagcagtctaggctactgtttagccaagctggacccaccagcatgtctcttcaagctaaaaactggctgcctggaccttgctacagacagcagcgtctgtcaaagcaggcaaacgacaacaacaacagcaactttccccggactgcggctacaaagtatcatctaaatggtcgggactcgttggttaatccaggaccagctatggccagccacaaagacgatgaagaaaagtttttccccatgcatggaaccctgatatttggtaaacaaggaacaaatgctaacgacgcggatttggaacatgtcatgattacagatgaagaagaaatcaggaccaccaatcccgtggctacagagcagtacggaaacgtgtcaaataatttgcaaaactcaaatactggtccaactacagaaaatgtcaatcaccagggagcgttacctggtatggtgtggcaggatcgagacgtgtacctgcagggacccatttgggccaagattcctcacaccgacggacactttcacccttctccactgatgggaggttttggactcaaacacccgcctcctcaaatcatgatcaaaaacactcctgttccagccaatcctcctacaaacttcagcgcggcaaagtttgcttccttcatcacacagtattccacgggacaggtcagcgtggagatcgagtgggagctgcagaaggagaacagcaaacgctggaaccccgagatccagtacacttccaactacaacaaatctgttaatgtggactttactgtggacactaatggtgtgtattcagagcctcgccccattggcaccagatacctgactcgtaatctgtaa

SEQ ID NO: 4467 - DNA, 2208 bp, synthetic construct
  misc_feature 1..2208: note = source = /note="Description of Artificial Sequence: Synthetic polynucleotide"
  source 1..2208: mol_type = other DNA
atggctgccgatggttatcttccagattggctcgaggacactctctctgaaggaataagacagtggtggaagctcaaacctggcccaccaccaccaaagcccgcagagcggcatcaggacgacagcaggggtcttgtgcttcctgggtacaagtacctcggacccttcaacggactcgacaaaggagagccggtcaacgaggcagacgctgcggccctcgagcacgacaaggcctacgaccgacagctcgacagcggagacaacccgtacctcaagtacaaccacgccgacgcggagtttcaggagcgtcttaaagaagatacgtcttttgggggcaacctcggacgagcagtcttccaggcgaaaaagagggttcttgaacctctgggcctggttgaggaacctgttaagacggctccgggaaaaaagaggccggtagagcactctcctgcggagccagactcctcctcgggaaccggaaaagcgggccagcagcctgcaagaaagagattgaatttcggtcagactggagacgcagactccgtacctgacccccagcctctcggacagccaccagcagcccccacaagtttgggatctactacaatggctacaggcagtggcgcaccaatggcagacaataacgagggtgccgatggagtgggtaattcctcaggaaattggcattgcgattcccaatggctgggcgacagagtcatcaccaccagcacccgaacctgggccctgcccacctacaacaaccacctctacaagcaaatctccagccaatcaggagcatcgaacgacaaccactactttggctacagcaccccttgggggtattttgacttcaacagattccactgtcacttctccccacgtgactggcaaagactcatcaacaacaactggggattccgacccaagagactcaacttcaagctctttaacattcaagtcaaagaggtcacgcagaatgacggtacgacgacgattgccaataaccttaccagcacggttcaggtgtttactgactcggagtaccagctcccgtacgtcctcggctcggcgcatcaaggatgcctcccgccgtttccagcggacgtcttcatggtcccacagtatggatacctcaccctgaacaacgggagtcaggcggtaggacgctcttccttttactgcctggagtactttccttctcagatgctgcgtaccggaaacaactttaccttcagctacacctttgaggacgtgcctttccacagcagctacgctcacagccagagtttggaccggctgatgaatcctctgatcggccagtatctgtattatctgaacaggacacaatcaaatagtggaactcttcagcagtctaggctactgtttagccaagctggacccaccagcatgtctcttcaagctaaaaactggctgcctggaccttgctacagacagcagcgtctgtcaaagcaggcaaacgacaacaacaacagcaactttccctggactgcggctacaaagtatcatctaaatggtcgggactcgttggttaatccaggaccagctatggccagccacaaagacgatgaagaaaagtttttccccatgcatggaaccctgatatttggtaaacaaggaacaaatgctaacgacgcggatttggaacatgtcatgattacagatgaagaagaaatcaggaccaccaatcccgtggctacagagcagtacggaaacgtgtcaaataatttgcaaaactcaaatactggtccaactacagaaaatgtcaatcaccagggagcgttacctggtatggtgtggcaggatcgagacgtgtacctgcagggacccatttgggccaagattcctcacaccgacggacactttcacccttctccactgatgggaggttttggactcaaacacccgcctcctcaaatcatgatcaaaaacactcctgttccagccaatcctcctacaaacttcagcgcggcaaagtttgcttccttcatcacacagtattccacgggacaggtcagcgtggagatcgagtgggagctgcagaaggagaacagcaaacgctggaaccccgagatccagtacacttccaactacaacaaatctgttaatgtggactttactgtggacactaatggtgtgtattcagagcctcgccccattggcaccagatacctgactcgtaatctgtaa

SEQ ID NO: 4468 - DNA, 2208 bp, synthetic construct
  misc_feature 1..2208: note = source = /note="Description of Artificial Sequence: Synthetic polynucleotide"
  source 1..2208: mol_type = other DNA
atggctgccgatggttatcttccagattggctcgaggacactctctctgaaggaataagacagtggtggaagctcaaacctggcccaccaccaccaaagcccgcagagcggcatcaggacgacagcaggggtcttgtgcttcctgggtacaagtacctcggacccttcaacggactcgacaaaggagagccggtcaacgaggcagacgctgcggccctcgagcacgacaaggcctacgaccggcagctcgacagcggagacaacccgtacctcaagtacaaccacgccgacgcggagtttcaggagcgtcttaaagaagatacgtcttttgggggcaacctcggacgagcagtcttccaggcgaaaaagagggttcttgaacctctgggcctggttgaggaacctgttaagacggctccgggaaaaaagaggccggtagagcactctcctgcggagccagactcctcctcgggaaccggaaaagcgggccagcagcctgcaagaaagagattgaatttcggtcagactggagacgcagactccgtacctgacccccagcctctcggacagccaccagcagcccccacaagtttgggatctactacaatggctacaggcagtggcgcaccaatggcagacaataacgagggtgccgatggagtgggtaattcctcaggaaattggcattgcgattcccaatggctgggcgacagagtcatcaccaccagcacccgaacctgggccctgcccacctacaacaaccacctctacaagcaaatctccagccaatcaggagcatcgaacgacaaccactactttggctacagcaccccttgggggtattttgacttcaacagattccactgtcacttctccccacgtgactggcaaagactcatcaacaacaactggggattccgacccaagagactcaacttcaagctctttaacattcaagtcaaagaggtcacgcagaatgacggtacgacgacgattgccaataaccttaccagcacggttcaggtgtttactgactcggagtaccagctcccgtacgtcctcggctcggcgcatcaaggatgcctcccgccgtttccagcggacgtcttcatggtcccacagtatggatacctcaccctgaacaacgggagtcaggcggtaggacgctcttccttttactgcctggagtactttccttctcagatgctgcgtaccggaaacaactttaccttcagctacacctttgaggacgtgcctttccacagcagctacgctcacagccagagtttggaccggctgatgaatcctctgatcgaccagtatctgtattatctgaacaggacacaatcaaatagtggaactcttcagcagtctaggctactgtttagccaagctggacccaccagcatgtctcttcaagctaaaaactggctgcctggaccttgctacagacagcagcgtctgtcaaagcaggcaaacgacaacaacaacagcaactttccctggactgcggctacaaagtatcatctaaatggtcgggactcgttggttaatccaggaccagctatggccagccacaaagacgatgaagaaaagtttttccccatgcatggaaccctgatatttggtaaacaaggaacaaatgctaacgacgcggatttggaacatgtcatgattacagatgaagaagaaatcaggaccaccaatcccgtggctacagagcagtacggaaacgtgtcaaataatttgcaaaactcaaatactggtccaactacagaaaatgtcaatcaccagggagcgttacctggtatggtgtggcaggatcgagacgtgtacctgcagggacccatttgggccaagattcctcacaccgacggacactttcacccttctccactgatgggaggttttggactcaaacacccgcctcctcaaatcatgatcaaaaacactcctgttccagccaatcctcctacaaacttcagcgcggcaaagtttgcttccttcatcacacagtattccacgggacaggtcggcgtggagatcgagtgggagctgcagaaggagaacagcaaacgctggaaccccgagatccagtacacttccaactacaacaaatctgttaatgtggactttactgtggacactaatggtgtgtattcagagcctcgccccattggcaccagatacctgactcgtaatctgtaa

SEQ ID NO: 4469 - DNA, 2208 bp, synthetic construct
  misc_feature 1..2208: note = source = /note="Description of Artificial Sequence: Synthetic polynucleotide"
  source 1..2208: mol_type = other DNA
atggctgccgatggttatcttccagattggctcgaggacactctctctgaaggaataagacagtggtggaagctcaaacctggcccaccaccaccaaagcccgcagagcggcatcaggacgacagcaggggtcttgtgcttcctgggtacaagtacctcggacccttcaacggactcgacaaaggagagccggtcaacgaggcagacgctgcggccctcgagcacgacaaggcctacgaccggcagctcgacagcggagacaacccgtacctcaagtacaaccacgccgacgcggagtttcaggagcgtcttaaagaagatacgtcttttgggggcaacctcggacgagcagtcttccaggcgaaaaagagggttcttgaacctctgggcctggttgaggaacctgttaagacggctccgggaaaaaagaggccggtagagcactctcctgcggagccagactcctcctcgggaaccggaaaagcgggccagcagcctgcaagaaagagattgaatttcggtcagactggagacgcagactccgtacctgacccccagcctctcggacagccaccagcagcccccacaagtttgggatctactacaatggctacaggcagtggcgcaccaatggcagacaataacgagggtgccgatggagtgggtaattcctcaggaaattggcattgcgattcccaatggctgggcgacagagccatcaccaccagcacccgaacctgggccctgcccacctacaacaaccacctctacaagcaaatctccagccaatcaggagcatcgaacgacaaccactactttggctacagcaccccttgggggtattttgacttcaacagattccactgtcacttctccccacgtgactggcaaagactcatcaacaacaactggggattccgacccaagagactcaacttcaagctctttaacattcaagtcaaagaggtcacgcagaatgacggtacgacgacgattgccaataaccttaccagcacggttcaggtgtttactgactcggagtaccagctcccgtacgtcctcggctcggcgcatcaaggatgcctcccgccgtttccagcggacgtcttcatggtcccacagtatggatacctcaccctgaacaacgggagtcaggcggtaggacgctcttccttttactgcctggagtactttccttctcagatgctgcgtaccggaaacaactttaccttcagctacacctttgaggacgtgcctttccacagcagctacgctcacagccagagtttggaccggctgatgaatcctctgatcgaccagtatctgtattatctgaacaggacacaatcaaatagtggaactcttcagcagtctaggctactgtttagccaagctggacccaccagcatgtctcttcaagctaaaaactggctgcctggaccttgctacagacagcagcgtctgtcaaagcaggcaaacgacaacaacaacagcaactttccctggactgcggctacaaagtatcatctaaatggtcgggactcgttggttaatccaggaccagctatggccagccacaaagacgatgaagaaaagtttttccccatgcatggaaccctgatatttggtaaacaaggaacaaatgctaacgacgcggatttggaacatgtcatgattacagatgaagaagaaatcaggaccaccaatcccgtggctacagagcagtacggaaacgtgtcaaataatttgcaaaactcaaatactggtccaactacagaaaatgtcaatcaccagggagcgttacctggtatggtgtggcaggatcgagacgtgtacctgcagggacccatttgggccaagattcctcacaccgacggacactttcacccttctccactgatgggaggttttggactcaaacacccgcctcctcaaatcatgatcaaaaacactcctgttccagccaatcctcctacaaacttcagcgcggcaaagtttgcttccttcatcacacagtattccacgggacaggtcagcgtggagatcgagtgggagctgcagaaggagaacagcaaacgctggaaccccgagatccagtacacttccaactacaacaaatctgttaatgtggactttactgtggacactaatggtgtgtattcagagcctcgccccattggcaccagatacctgactcgtaatctgtaa

SEQ ID NO: 4470 - DNA, 2208 bp, synthetic construct
  misc_feature 1..2208: note = source = /note="Description of Artificial Sequence: Synthetic polynucleotide"
  source 1..2208: mol_type = other DNA
atggctgccgatggttatcttccagattggctcgaggacactctctctgaaggaataagacagtggtggaagctcaaacctggcccaccaccaccaaagcccgcagagcggcatcaggacgacagcaggggtcttgtgcttcctgggtacaagtacctcggacccttcaacggactcgacaaaggagagccggtcaacgaggcagacgctgcggccctcgagcacgacaaggcctacgaccggcagctcgacagcggagacaacccgtacctcaagtacaaccacgccgacgcggagtttcaggagcgtcttaaagaagatacgtcttttgggggcaacctcggacgagcagtcttccaggcgaaaaagagggttcttgaacctctgggcctggttgaggaacctgttaagacggctccgggaaaaaagaggccggtagagcactctcctgcggagccagactcctcctcgggaaccggaaaagcgggccagcagcctgcaagaaagagattgaatttcggtcagactggagacgcaggctccgtacctgacccccagcctctcggacagccaccagcagcccccacaagtttgggatctactacaatggctacaggcagtggcgcaccaatggcagacaataacgagggtgccgatggagtgggtaattcctcaggaaattggcattgcgattcccaatggctgggcgacagagtcatcaccaccagcacccgaacctgggccctgcccacctacaacaaccacctctacaagcaaatctccagccaatcaggagcatcgaacgacaaccactactttggctacagcaccccttgggggtattttgacttcaacagattccactgtcacttctccccacgtgactggcaaagactcatcaacaacaactggggattccgacccaagagactcaacttcaagctctttaacattcaagtcaaagaggtcacgcagaatgacggtacgacgacgattgccaataaccttaccagcacggttcaggtgtttactgactcggagtaccagctcccgtacgtcctcggctcggcgcatcaaggatgcctcccgccgtttccagcggacgtcttcatggtcccacagtatggatacctcaccctgaacaacgggagtcaggcggtaggacgctcttccttttactgcctggagtactttccttctcagatgctgcgtaccggaaacaactttaccttcagctacacctttgaggacgtgcctttccacagcagctacgctcacagccagagtttggaccggctgatgaatcctctgatcgaccagtatctgtattatctgaacaggacacaatcaaatagtggaactcttcagcagtctaggctactgtttagccaagctggacccaccagcatgtctcttcaagctaaaaactggctgcctggaccttgctacagacagcagcgtctgtcaaagcaggcaaacgacaacaacaacagcaactttccctggactgcggctacaaagtatcatctaaatggtcgggactcgttggttaatccaggaccagctatggccagccacaaagacgatgaagaaaagtttttccccatgcatggaaccctgatatttggtaaacaaggaacaaatgctaacgacgcggatttggaacatgtcatgattacagatgaagaagaaatcaggaccaccaatcccgtggctacagagcagtacggaaacgtgtcaaataatttgcaaaactcaaatactggtccaactacagaaaatgtcaatcaccagggagcgttacctggtatggtgtggcaggatcgagacgtgtacctgcagggacccatttgggccaagattcctcacaccgacggacactttcacccttctccactgatgggaggttttggactcaaacacccgcctcctcaaatcatgatcaaaaacactcctgttccagccaatcctcctacaaacttcagcgcggcaaagtttgcttccttcatcacacagtattccacgggacaggtcagcgtggagatcgagtgggagctgcagaaggagaacagcaaacgctggaaccccgagatccagtacacttccaactacaacaaatctgttaatgtggactttactgtggacactaatggtgtgtattcagagcctcgccccattggcaccagatacctgactcgtaatctgtaa

SEQ ID NO: 4471 - DNA, 2208 bp, synthetic construct
  misc_feature 1..2208: note = source = /note="Description of Artificial Sequence: Synthetic polynucleotide"
  source 1..2208: mol_type = other DNA
atggctgccgatggttatcttccagattggctcgaggacactctctctgaaggaataagacagtggtggaagctcaaacctggcccaccaccaccaaagcccgcagagcggcatcaggacgacagcaggggtcttgtgcttcctgggtacaagtacctcggacccttcaacggactcgacaaaggagagccggtcaacgaggcagacgctgcggccctcgagcacgacaaggcctacgaccggcagctcgacagcggagacagcccgtacctcaagtacaaccacgccgacgcggagtttcaggagcgtcttaaagaagatacgtcttttgggggcaacctcggacgagcagtcttccaggcgaaaaagagggttcttgaacctctgggcctggttgaggaacctgttaagacggctccgggaaaaaagaggccggtagagcactctcctgcggagccagactcctcctcgggaaccggaaaagcgggccagcagcctgcaagaaagagattgaatttcggtcagactggagacgcagactccgtacctgacccccagcctctcggacagccaccagcagcccccacaagtttgggatctactacaatggctacaggcagtggcgcaccaatggcagacaataacgagggtgccgatggagtgggtaattcctcaggaaattggcattgcgattcccaatggctgggcgacagagtcatcaccaccagcacccgaacctgggccctgcccacctacaacaaccacctctacaagcaaatctccagccaatcaggagcatcgaacgacaaccactactttggctacagcaccccttgggggtattttgacttcaacagattccactgtcacttctccccacgtgactggcaaagactcatcaacaacaactggggattccgacccaagagactcaacttcaagctctttaacattcaagtcaaagaggtcacgcagaatgacggtacgacgacgattgccaataaccttaccagcacggttcaggtgtttactgactcggagtaccagctcccgtacgtcctcggctcggcgcatcaaggatgcctcccgccgtttccagcggacgtcttcatggtcccacagtatggatacctcaccctgaacaacgggagtcaggcggtaggacgctcttccttttactgcctggagtactttccttctcagatgctgcgtaccggaaacaactttaccttcagctacacctttgaggacgtgcctttccacagcagctacgctcacagccagagtttggaccggctgatgaatcctctgatcgaccagtatctgtattatctgaacaggacacaatcaaatagtggaactcttcagcagtctaggctactgtttagccaagctggacccaccagcatgtctcttcaagctaaaaactggctgcctggaccttgctacagacagcagcgtctgtcaaagcaggcaaacgacaacaacaacagcaactttccctggactgcggctacaaagtatcatctaaatggtcgggactcgttggttaatccaggaccagctatggccagccacaaagacgatgaagaaaagtttttccccatgcatggaaccctgatatttggtaaacaaggaacaaatgctaacgacgcggatttggaacatgtcatgattacagatgaagaagaaatcaggaccaccaatcccgtggctacagagcagtacggaaacgtgtcaaataatttgcaaaactcaaatactggtccaactacagaaaatgtcaatcaccagggagcgttacctggtatggtgtggcaggatcgagacgtgtacctgcagggacccatttgggccaagattcctcacaccgacggacactttcacccttctccactgatgggaggttttggactcaaacacccgcctcctcaaatcatgatcaaaaacactcctgttccagccaatcctcctacaaacttcagcgcggcaaagtttgcttccttcatcacacagtattccacgggacaggtcagcgtggagatcgagtgggagctgcagaaggagaacagcaaacgctggaaccccgagatccagtacacttccaactacaacaaatctgttaatgtggactttactgtggacactaatggtgtgtattcagagcctcgccccattggcaccagatacctgactcgtaatctgtaa

SEQ ID NO: 4472 - DNA, 2208 bp, synthetic construct
  misc_feature 1..2208: note = source = /note="Description of Artificial Sequence: Synthetic polynucleotide"
  source 1..2208: mol_type = other DNA
atggctgccgatggttatcttccagattggctcgaggacactctctctgaaggaataagacagtggtggaagctcaaacctggcccaccaccaccaaagcccgcagagcggcatcaggacgacagcaggggtcttgtgcttcctgggtacaagtacctcggacccttcaacggactcgacaaaggagagccggtcaacgaggcagacgctgcggccctcgagcacgacaaggcctacgaccggcagctcgacagcggagacaacccgtacctcaagtacaaccacgccgacgcggagtttcaggagcgtcttaaagaagatacgtcttttgggggcaacctcggacgagcagtcttccaggcgaaaaagagggttcttgaacctctgggcctggttgaggaacctgttaagacggctccgggaaaaaagaggccggtagagcactctcctgcggagccagactcctcctcgggaaccggaaaagcgggccagcagcctgcaagaaagagattgaatttcggtcagactggagacgcagactccgtacctgacccccagcctctcggacagccaccagcagcccccacaagtttgggatctactacaatggctacaggcagtggcgcaccaatggcagacaataacgagggtgccgatggagtgggtaattcctcaggaaattggcattgcgattcccaatggctgggcgacagagtcatcaccaccagcacccgaacctgggccctgcccacctacaacaaccacctctacaagcaaatctccagccaatcaggagcatcgaacgacaaccactactttggctacagcaccccttgggggtattttgacttcaacagattccactgtcacttctccccacgtgactggcaaagactcatcaacaacaactggggattccgacccaagagactcaacttcaagctctttaacattcaagtcaaagaggtcacgcagaatgacggtacgacgacgattgccaataaccttaccagcacggttcaggtgtttactgactcggagtaccagctcccgtacgtcctcggctcggcgcatcaaggatgcctcccgccgtttccagcggacgtcttcatggtcccacagtatggatacctcaccctgaacaacgggagtcaggcggtaggacgctcttccttttactgcctggagtactttccttctcagatgctgcgtaccggaaacaactttaccttcagctacacctttgaggacgtgcctttccacagcagctacgctcacagccagagtttggaccggctgatgaatcctctgatcgaccagtatctgtattatctgaacaggacacaatcaaatagtggaactcttcagcagtctaggctactgtttagccaagctggacccaccagcatgtctcttcaagctaaaaactggctgcctggaccttgctacagacagcagcgtctgtcaaagcaggcaaacgacaacaacaacagcaactttccctggactgcggctacaaagtatcatctaaatggtcgggactcgttggttaatccaggaccagctatggccagccacaaagacgatgaagaaaagtttttccccatgcatggaaccctgatatttggtaaacaaggaacaaatgctaacgacgcggatttggaacatgtcatgattacagatgaagaagaaatcaggaccaccaatcccgtggctacagagcagtacggaaacgtgtcaaataatttgcaaaactcaaatactggtccaactacagaaaatgtcaatcaccagggagcgttacctggtatggtgtggcaggatcgagacgtgtacctgcagggacccatttgggccaagattcctcacaccgacggacactttcacccttctccactgatgggaggttttggactcaaacacccgcctcctcaaatcatgatcaaaaacactcctgttccagccaatcctcctacaaacttcagcgcggcaaagtttgcttccttcatcacacagtattccacgggacaggtcagcgtggagatcgagtgggagctgcagaaggagaacagcaaacgctggaaccccgagatccagtacacttccaactacaacaaatctgttaatgtggactttactgtggacactaatggtgtgtattcagagcctcgccccattggcaccagatacctgactcgtaatccgtaa

SEQ ID NO: 4473 - DNA, 2208 bp, synthetic construct
  misc_feature 1..2208: note = source = /note="Description of Artificial Sequence: Synthetic polynucleotide"
  source 1..2208: mol_type = other DNA
atggctgccgatggttatcttccagattggctcgaggacactctctctgaaggaataagacagtggtggaagctcaaacctggcccaccaccaccaaagcccgcagagcggcatcaggacgacagcaggggtcttgtgcttcctgggtacaagtacctcggacccttcaacggactcgacaaaggagagccggtcaacgaggcagacgctgcggccctcgagcacgacaaggcctacgaccggcagctcgacagcggagacaacccgtacctcaagtacaaccacgccgacgcggagtttcaggagcgtcttaaagaagatacgtcttttgggggcaacctcggacgagcagtcttccaggcgaaaaagagggttcttgaacctctgggcctggttgaggaacctgttaagacggctccgggaaaaaagaggccggtagagcactctcctgcggagccagactcctcctcgggaaccggaaaagcgggccagcagcctgcaagaaagagattgaatttcggtcagactggagacgcagactccgtacctgacccccagcctctcggacagccaccagcagcccccacaagtttgggatctactacaatggctacaggcagtggcgcaccaatggcagacaataacgagggtgccgatggagtgggtaattcctcaggaaattggcattgcgattcccaatggctgggcgacagagtcatcaccaccagcacccgaacctgggccctgcccacctacaacaaccacctctacaagcaaatctccagccaatcaggagcatcgaacgacaaccactactttggctacagcaccccttgggggtattttgacttcaacagattccactgtcacttctccccacgtgactggcaaagactcatcaacaacaactggggattccgacccaagagactcaacttcaagctctttaacattcaagtcaaagaggtcacgcagaatgacggtacgacgacgattgccaataaccttaccagcacggttcaggtgtttactgactcggagtaccagctcccgtacgtcctcggctcggcgcatcaaggatgcctcccgccgtttccagcggacgtcttcatggtcccacagtatggatacctcaccctgaacaacgggagtcaggcggtaggacgctcttccttttactgcctggagtactttccttctcagatgctgcgtaccggaaacaactttaccttcagctacacctttgaggacgtgcctttccacagcagctacgctcacagccagagtttggaccggctgatgaatcctctgatcgaccagtatctgtattatctgaacaggacacaatcaaatagtggaactcttcagcagtctaggctactgtttagccaagctggacccaccagcatgtctcttcaagctaaaaactggctgcctggaccttgctacagacagcagcgtccgtcaaagcaggcaaacgacaacaacaacagcaactttccctggactgcggctacaaagtatcatctaaatggtcgggactcgttggttaatccaggaccagctatggccagccacaaagacgatgaagaaaagtttttccccatgcatggaaccctgatatttggtaaacaaggaacaaatgctaacgacgcggatttggaacatgtcatgattacagatgaagaagaaatcaggaccaccaatcccgtggctacagagcagtacggaaacgtgtcaaataatttgcaaaactcaaatactggtccaactacagaaaatgtcaatcaccagggagcgttacctggtatggtgtggcaggatcgagacgtgtacctgcagggacccatttgggccaagattcctcacaccgacggacactttcacccttctccactgatgggaggttttggactcaaacacccgcctcctcaaatcatgatcaaaaacactcctgttccagccaatcctcctacaaacttcagcgcggcaaagtttgcttccttcatcacacagtattccacgggacaggtcagcgtggagatcgagtgggagctgcagaaggagaacagcaaacgctggaaccccgagatccagtacacttccaactacaacaaatctgttaatgtggactttactgtggacactaatggtgtgtattcagagcctcgccccattggcaccagatacctgactcgtaatctgtaa

SEQ ID NO: 4474 - DNA, 2208 bp, synthetic construct
  misc_feature 1..2208: note = source = /note="Description of Artificial Sequence: Synthetic polynucleotide"
  source 1..2208: mol_type = other DNA
atggctgccgatggttatcttccagattggctcgaggacactctctctgaaggaataagacagtggtggaagctcaaacctggcccaccaccaccaaagcccgcagagcggcatcaggacgacagcaggggtcttgtgcttcctgggtacaagtacctcggacccttcaacggactcgacaaaggagagccggtcaacgaggcagacgctgcggccctcgagcacgacaaggcctacgaccggcagctcgacagcggagacaacccgtacctcaagtacaaccacgccgacgcggagtttcaggagcgtcttaaagaagatacgtcttttgggggcaacctcggacgagcagtcttccaggcgaaaaagagggttcttgaacctctgggcctggttgaggaacctgttaagacggctccgggaaaaaagaggccggtagagcactctcctgcggagccagactcctcctcgggaaccggaaaagcgggccagcagcctgcaagaaagagattgaatttcagtcagactggagacgcagactccgtacctgacccccagcctctcggacagccaccagcagcccccacaagtttgggatctactacaatggctacaggcagtggcgcaccaatggcagacaataacgagggtgccgatggagtgggtaattcctcaggaaattggcattgcgattcccaatggctgggcgacagagtcatcaccaccagcacccgaacctgggccctgcccacctacaacaaccacctctacaagcaaatctccagccaatcaggagcatcgaacgacaaccactactttggctacagcaccccttgggggtattttgacttcaacagattccactgtcacttctccccacgtgactggcaaagactcatcaacaacaactggggattccgacccaagagactcaacttcaagctctttaacattcaagtcaaagaggtcacgcagaatgacggtacgacgacgattgccaataaccttaccagcacggttcaggtgtttactgactcggagtaccagctcccgtacgtcctcggctcggcgcatcaaggatgcctcccgccgtttccagcggacgtcttcatggtcccacagtatggatacctcaccctgaacaacgggagtcaggcggtaggacgctcttccttttactgcctggagtactttccttctcagatgctgcgtaccggaaacaactttaccttcagctacacctttgaggacgtgcctttccacagcagctacgctcacagccagagtttggaccggctgatgaatcctctgatcgaccagtatctgtattatctgaacaggacacaatcaaatagtggaactcttcagcagtctaggctactgtttagccaagctggacccaccagcatgtctcttcaagctaaaaactggctgcctggaccttgctacagacagcagcgtctgtcaaagcaggcaaacgacaacaacaacagcaactttccctggactgcggctacaaagtatcatctaaatggtcgggactcgttggttaatccaggaccagctatggccagccacaaagacgatgaagaaaagtttttccccatgcatggaaccctgatatttggtaaacaaggaacaaatgctaacgacgcggatttggaacatgtcatgattacagatgaagaagaaatcaggaccaccaatcccgtggctacagagcagtacggaaacgtgtcaaataatttgcaaaactcaaatactggtccaactacagaaaatgtcaatcaccagggagcgttacctggtatggtgtggcaggatcgagacgtgtacctgcagggacccatttgggccaagattcctcacaccgacggacactttcacccttctccactgatgggaggttttggactcaaacacccgcctcctcaaatcatgatcaaaaacactcctgttccagccaatcctcctacaaacttcagcgcggcaaagtttgcttccttcatcacacagtattccacgggacaggtcagcgtggagatcgagtgggagctgcagaaggagaacagcaaacgctggaaccccgagatccagtacacttccaactacaacaaatctgttaatgtggactttactgtggacactaatggtgtgtattcagagcctcgccccattggcaccagatacctgactcgtaatctgtaa

SEQ ID NO: 4475 - DNA, 2208 bp, synthetic construct
  misc_feature 1..2208: note = source = /note="Description of Artificial Sequence: Synthetic polynucleotide"
  source 1..2208: mol_type = other DNA
atggctgccgatggttatcttccagattggctcgaggacactctctctgaaggaataagacagtggtggaagctcaaacctggcccaccaccaccaaagcccgcagagcggcatcaggacgacagcaggggtcttgtgcttcctgggtacaagtacctcggacccttcaacggactcgacaaaggagagccggtcaacgaggcagacgctgcggccctcgagcacgacaaggcctacgaccggcagctcgacagcggagacaacccgtacctcaagtacaaccacgccgacgcggagtttcaggagcgtcttaaagaagatacgtcttttgggggcaacctcggacgagcagtcttccaggcgaaaaagagggttcttgaacctctgggcctggttgaggaacctgttaagacggctccgggaaaaaagaggccggtagagcactctcctgcggagccagactcctcctcgggaaccggaaaagcgggccagcagcctgcaagaaagagattgaatttcggtcagactggagacgcagactccgtacctgacccccagcctctcggacagccaccagcagcccccacaagtttgggatctactacaatggctacaggcagtggcgcaccaatggcagacaataacgagggtgccgatggagtgggtaattcctcaggaaattggcattgcgattcccaatggctgggcgacagagtcatcaccaccagcacccgaacctgggccctgcccacctacaacaaccacctctacaagcaaatctccagccaatcaggagcatcgaacgacaaccactactttggctacagcaccccttgggggtattttgacttcaacagattccactgtcacttctccccacgtgactggcaaagactcatcaacaacaactggggattccgacccaagagactcaacttcaagctctttaacattcaagtcaaagaggtcacgcagaatgacggtacgacgacgattgccaataaccttaccagcacggttcaggtgtttactgactcggagtaccagctcccgtacgtcctcggctcggcgcatcaaggatgcctcccgccgtttccagcggacgtcttcatggtcccacagtatggatacctcaccctgaacaacgggagtcaggcggtaggacgctcttccttttactgcctggagtactttccttctcagatgctgcgtaccggaaacaactttaccttcagctacacctttgaggacgtgcctttccacagcagctacgctcacagccagagtttggaccggctgatgaatcctctgatcgaccagtatctgtattatctgaacaggacacaatcaaatagtggaactcttcagcagtctaggctactgtttagccaagctggacccaccagcatgtctcttcaagctaaaaactggctgcctggaccttgctacagacagcagcgtctgtcaaagcaggcaaacgacaacaacaacagcaactttccctggactgcggctacaaagtatcatctaaatggtcgggactcgttggttaatccaggaccagctatggccagccacaaagacgatgaagaaaagtttttccccatgcatggaaccctgatatttggtaaacaaggaacaaatgctaacgacgcggatttggaacatgtcatgattacagatgaagaagaaatcaggaccaccaatcccgtggctacagagcagtacggaaacgtgtcaaataatttgcaaaactcaaatactggtccaactacagaaaatgtcaatcaccagggagcgttacctggtatggtgtggcaggatcgagacgtgtacctgcagggacccatttgggccaagattcctcacaccgacggacactttcacccttctccactgatgggaggttttggactcaaacacccgcctcctcaaatcatgatcaaaaacactcctgttccagccaatcctcctacaaacttcagcgcggcaaagtttgcttccttcatcacacagtattccacgggacaggtcagcgtggagatcgagtgggagccgcagaaggagaacagcaaacgctggaaccccgagatccagtacacttccaactacaacaaatctgttaatgtggactttactgtggacactaatggtgtgtattcagagcctcgccccattggcaccagatacctgactcgtaatctgtaa

SEQ ID NO: 4476 - DNA, 2208 bp, synthetic construct
  misc_feature 1..2208: note = source = /note="Description of Artificial Sequence: Synthetic polynucleotide"
  source 1..2208: mol_type = other DNA
atggctgccgatggttatcttccagattggctcgaggacactctctctgaaggaataagacagtggtggaagctcaaacctggcccaccaccaccaaagcccgcagagcggcatcaggacgacagcaggggtcttgtgcttcctgggtacaagtacctcggacccttcaacggactcgacaaaggagagccggtcaacgaggcagacgctgcggccctcgagcacgacaaggcctacgaccggcagctcgacagcggagacaacccgtacctcaagtacaaccacgccgacgcggagtttcaggagcgtcttaaagaagatacgtcttttgggggcaacctcggacgagcagtcttccaggcgaaaaagagggttcttgaacctctgggcctggttgaggaacctgttaagacggctccgggaaaaaagaggccggtagagcactctcctgcggagccagactcctcctcgggaaccggaaaagcgggccagcagcctgcaagaaagagattgaatttcggtcagactggagacgcagactccgtacctgacccccagcctctcggacagccaccagcagcccccacaagtttgggatctactacaatggctacaggcagtggcgcaccaatggcagacaataacgagggtgccgatggagtgggtaattcctcaggaaattggcattgcgattcccaatggctgggcgacagagtcatcaccaccagcacccgaacctgggccctgcccacctacaacaaccacctctacaagcaaatctccagccaatcaggagcatcgaacgacaaccactactttggctacagcaccccttgggggtattttgacttcaacagattccactgtcacttctccccacgtgactggcaaagactcatcaacaacaactggggattccgacccaagagacccaacttcaagctctttaacattcaagtcaaagaggtcacgcagaatgacggtacgacgacgattgccaataaccttaccagcacggttcaggtgtttactgactcggagtaccagctcccgtacgtcctcggctcggcgcatcaaggatgcctcccgccgtttccagcggacgtcttcatggtcccacagtatggatacctcaccctgaacaacgggagtcaggcggtaggacgctcttccttttactgcctggagtactttccttctcagatgctgcgtaccggaaacaactttaccttcagctacacctttgaggacgtgcctttccacagcagctacgctcacagccagagtttggaccggctgatgaatcctctgatcgaccagtatctgtattatctgaacaggacacaatcaaatagtggaactcttcagcagtctaggctactgtttagccaagctggacccaccagcatgtctcttcaagctaaaaactggctgcctggaccttgctacagacagcagcgtctgtcaaagcaggcaaacgacaacaacaacagcaactttccctggactgcggctacaaagtatcatctaaatggtcgggactcgttggttaatccaggaccagctatggccagccacaaagacgatgaagaaaagtttttccccatgcatggaaccctgatatttggtaaacaaggaacaaatgctaacgacgcggatttggaacatgtcatgattacagatgaagaagaaatcaggaccaccaatcccgtggctacagagcagtacggaaacgtgtcaaataatttgcaaaactcaaatactggtccaactacagaaaatgtcaatcaccagggagcgttacctggtatggtgtggcaggatcgagacgtgtacctgcagggacccatttgggccaagattcctcacaccgacggacactttcacccttctccactgatgggaggttttggactcaaacacccgcctcctcaaatcatgatcaaaaacactcctgttccagccaatcctcctacaaacttcagcgcggcaaagtttgcttccttcatcacacagtattccacgggacaggtcagcgtggagatcgagtgggagctgcagaaggagaacagcaaacgctggaaccccgagatccagtacacttccaactacaacaaatctgttaatgtggactttactgtggacactaatggtgtgtattcagagcctcgccccattggcaccagatacctgactcgtaatctgtaa

SEQ ID NO: 4477 - DNA, 2208 bp, synthetic construct
  misc_feature 1..2208: note = source = /note="Description of Artificial Sequence: Synthetic polynucleotide"
  source 1..2208: mol_type = other DNA
atggctgccgatggttatcttccagattggctcgaggacactctctctgaaggaataagacagtggtggaagctcaaacctggcccaccaccaccaaagcccgcagagcggcatcaggacgacagcaggggtcttgtgcttcctgggtacaagtacctcggacccttcaacggactcgacaaaggagagccggtcaacgaggcagacgctgcggccctcgagcacgacaaggcctacgaccggcagctcgacagcggagacaacccgtacctcaagtacaaccacgccgacgcggagtttcaggagcgtcttaaagaagatacgtcttttgggggcaacctcggacgagcagtcttccaggcgaaaaagagggttcttgaacctctgggcctggttgaggaacctgttaagacggctccgggaaaaaagaggccggtagagcactctcctgcggagccagactcctcctcgggaaccggaaaagcgggccagcagcctgcaagaaagagattgaatttcggtcagactggagacgcagactccgtacctgacccccagcctctcggacagccaccagcagcccccacaagtttgggatctactacaatggctacaggcagtggcgcaccaatggcagacaataacgagggtgccgatggagtgggtaattcctcaggaaattggcattgcgattcccaatggctgggcgacagagtcatcaccaccagcacccgaacctgggccctgcccacctacaacaaccacctctacaagcaaatctccagccaatcaggagcatcgaacgacaaccactactttggctacagcaccccttgggggtattttgacttcaacagattccactgtcacttctccccacgtgactggcaaagactcatcaacaacaactggggattccgacccaagagactcaacttcaagctctttaacattcaagtcaaagaggtcacgcagaatgacggtacgacgacgattgccaataaccttaccagcacggttcaggtgtttactgactcggagtaccagctcccgtacgtcctcggctcggcgcatcaaggatgcctcccgccgtttccagcggacgtcttcatggtcccacagtatggatacctcaccctgaacaacgggagtcaggcggtaggacgctcttccttttactgcctggagtactttccttctcagatgctgcgtaccggaaacaactttaccttcagctacacctttgaggacgtgcctttccacagcagctacgctcacagccagagtttggaccggctgatgaatcctctgatcgaccagtatctgtattatctgaacaggacacaatcaaatagtggaactcttcagcagtctaggctactgtttagccaagctggacccaccagcatgtctcttcaagctaaaaactggctgcctggaccttgctacagacagcagcgtctgtcaaagcaggcaaacgacaacaacaacagcaactttccctggactgcggctacaaagtatcatctaaatggtcgggactcgttggttaatccaggaccagctatggccagccacaaagacgatgaagaaaagtttttccccatgcatggaaccctgatatttggtaaacaaggaacaaatgctaacgacgcggatttggaacatgtcgtgattacagatgaagaagaaatcaggaccaccaatcccgtggctacagagcagtacggaaacgtgtcaaataatttgcaaaactcaaatactggtccaactacagaaaatgtcaatcaccagggagcgttacctggtatggtgtggcaggatcgagacgtgtacctgcagggacccatttgggccaagattcctcacaccgacggacactttcacccttctccactgatgggaggttttggactcaaacacccgcctcctcaaatcatgatcaaaaacactcctgttccagccaatcctcctacaaacttcagcgcggcaaagtttgcttccttcatcacacagtattccacgggacaggtcagcgtggagatcgagtgggagctgcagaaggagaacagcaaacgctggaaccccgagatccagtacacttccaactacaacaaatctgttaatgtggactttactgtggacactaatggtgtgtattcagagcctcgccccattggcaccagatacctgactcgtaatctgtaa

SEQ ID NO: 4478 - DNA, 2208 bp, synthetic construct
  misc_feature 1..2208: note = source = /note="Description of Artificial Sequence: Synthetic polynucleotide"
  source 1..2208: mol_type = other DNA
atggctgccgatggttatcttccagattggctcgaggacactctctctgaaggaataagacagtggtggaagctcaaacctggcccaccaccaccaaagcccgcagagcggcatcaggacgacagcaggggtcttgtgcttcctgggtacaagtacctcggacccttcaacggactcgacaaaggagagccggtcaacgaggcagacgctgcggccctcgagcacgacaaggcctacgaccggcagctcgacagcggagacaacccgtacctcaagtacaaccacgccgacgcggagtttcaggagcgtcttaaagaagatacgtcttttgggggcaacctcggacgagcagtcttccaggcgaaaaagagggttcttgaacctctgggcctggttgaggaacctgttaagacggctccgggaaaaaagaggccggtagagcactctcctgcggagccagactcctcctcgggaaccggaaaagcgggccagcagcctgcaagaaagagattgaatttcggtcagactggagacgcagactccgtacctgacccccagcctctcggacagccaccagcagcccccacaagtttgggatctactacaatggctacaggcagtggcgcaccaatggcagacaataacgagggtgccgatggagtgggtaattcctcaggaaattggcattgcgattcccaatggctgggcgacagagtcatcaccaccagcacccgaacctgggccctgcccacctacaacaaccacctctacaagcaaatctccagccaatcaggagcatcgaacgacaaccactactttggctacagcaccccttgggggtattttgacttcaacagattccactgtcacttctccccacgtgactggcaaagactcatcaacaacaactggggattccgacccaagagactcaacttcaagctctttaacattcaagtcaaagaggtcacgcagaatgacggtacgacgacgattgccaataaccttaccagcacggttcaggtgtttactgactcggagtaccagctcccgtacgtcctcggctcggcgcatcaaggatgcctcccgccgtttccagcggacgtcttcatggtcccacagtatggatacctcaccctgaacaacgggagtcaggcggtaggacgctcttccttttactgcctggagtactttccttctcagatgctgcgtaccggaaacaactttaccttcagctacacctttgaggacgtgcctttccacagcagctacgctcacagccagagtttggaccggctgatgaatcctctgatcgaccagtatctgtattatctgaacaggacacaatcaaatagtggaactcttcagcagtctaggctactgtttagccaagctggacccaccagcatgtctcttcaagctaaaaactggctgcctggaccttgctacagacagcagcgtctgtcaaagcaggcaaacgacaacaacaacagcaactttccctggactgcggctacaaagtatcatctaaatggtcgggactcgttggttaatccaggaccagctatggccagccacaaagacgatgaagaaaagtttttccccatgcatggaaccctgatatttggtaaacaaggaacaaatgctaacgacgcggatttggaacatgtcatgattacagatgaagaagaaatcaggaccaccaatcccgtggctacagagcagtacggaaacgtgtcaaataatttgcaaaactcaaatactggtccaactacagaaaatgtcaatcaccagggagcgttacctggtatggtgtggcgggatcgagacgtgtacctgcagggacccatttgggccaagattcctcacaccgacggacactttcacccttctccactgatgggaggttttggactcaaacacccgcctcctcaaatcatgatcaaaaacactcctgttccagccaatcctcctacaaacttcagcgcggcaaagtttgcttccttcatcacacagtattccacgggacaggtcagcgtggagatcgagtgggagctgcagaaggagaacagcaaacgctggaaccccgagatccagtacacttccaactacaacaaatctgttaatgtggactttactgtggacactaatggtgtgtattcagagcctcgccccattggcaccagatacctgactcgtaatctgtaa

SEQ ID NO: 4479 - DNA, 2208 bp, synthetic construct
  misc_feature 1..2208: note = source = /note="Description of Artificial Sequence: Synthetic polynucleotide"
  source 1..2208: mol_type = other DNA
atggctgccgatggttatcttccagattggctcgaggacactctctctgaaggaataagacagtggtggaagctcaaacctggcccaccaccaccaaagcccgcagagcggcatcaggacgacagcaggggtcttgtgcttcctgggtacaagtacctcggacccttcaacggactcgacaaaggagagccggtcaacgaggcagacgctgcggccctcgagcacgacaaggcctacgaccggcagctcgacagcggagacaacccgtacctcaagtacaaccacgccgacgcggagtttcaggagcgtcttaaagaagatacgtcttttgggggcaacctcggacgagcagtcttccaggcgaaaaagagggttcttgaacctctgggcctggttgaggaacctgttaagacggctccgggaaaaaagaggccggtagagcactctcctgcggagccagactcctcctcgggaaccggaaaagcgggccagcagcctgcaagaaagagattgaatttcggtcagactggaggcgcagactccgtacctgacccccagcctctcggacagccaccagcagcccccacaagtttgggatctactacaatggctacaggcagtggcgcaccaatggcagacaataacgagggtgccgatggagtgggtaattcctcaggaaattggcattgcgattcccaatggctgggcgacagagtcatcaccaccagcacccgaacctgggccctgcccacctacaacaaccacctctacaagcaaatctccagccaatcaggagcatcgaacgacaaccactactttggctacagcaccccttgggggtattttgacttcaacagattccactgtcacttctccccacgtgactggcaaagactcatcaacaacaactggggattccgacccaagagactcaacttcaagctctttaacattcaagtcaaagaggtcacgcagaatgacggtacgacgacgattgccaataaccttaccagcacggttcaggtgtttactgactcggagtaccagctcccgtacgtcctcggctcggcgcatcaaggatgcctcccgccgtttccagcggacgtcttcatggtcccacagtatggatacctcaccctgaacaacgggagtcaggcggtaggacgctcttccttttactgcctggagtactttccttctcagatgctgcgtaccggaaacaactttaccttcagctacacctttgaggacgtgcctttccacagcagctacgctcacagccagagtttggaccggctgatgaatcctctgatcgaccagtatctgtattatctgaacaggacacaatcaaatagtggaactcttcagcagtctaggctactgtttagccaagctggacccaccagcatgtctcttcaagctaaaaactggctgcctggaccttgctacagacagcagcgtctgtcaaagcaggcaaacgacaacaacaacagcaactttccctggactgcggctacaaagtatcatctaaatggtcgggactcgttggttaatccaggaccagctatggccagccacaaagacgatgaagaaaagtttttccccatgcatggaaccctgatatttggtaaacaaggaacaaatgctaacgacgcggatttggaacatgtcatgattacagatgaagaagaaatcaggaccaccaatcccgtggctacagagcagtacggaaacgtgtcaaataatttgcaaaactcaaatactggtccaactacagaaaatgtcaatcaccagggagcgttacctggtatggtgtggcaggatcgagacgtgtacctgcagggacccatttgggccaagattcctcacaccgacggacactttcacccttctccactgatgggaggttttggactcaaacacccgcctcctcaaatcatgatcaaaaacactcctgttccagccaatcctcctacaaacttcagcgcggcaaagtttgcttccttcatcacacagtattccacgggacaggtcagcgtggagatcgagtgggagctgcagaaggagaacagcaaacgctggaaccccgagatccagtacacttccaactacaacaaatctgttaatgtggactttactgtggacactaatggtgtgtattcagagcctcgccccattggcaccagatacctgactcgtaatctgtaa

SEQ ID NO: 4480 - DNA, 2208 bp, synthetic construct
  misc_feature 1..2208: note = source = /note="Description of Artificial Sequence: Synthetic polynucleotide"
  source 1..2208: mol_type = other DNA
atggctgccgatggttatcttccagattggctcgaggacactctctctgaaggaataagacagtggtggaagctcaaacctggcccaccaccaccaaagcccgcagagcggcatcaggacgacagcaggggtcttgtgcttcctgggtacaagtacctcggacccttcaacggactcgacaaaggagagccggtcaacgaggcagacgctgcggccctcgagcacgacaaggcctacgaccggcagctcgacagcggagacaacccgtacctcaagtacaaccacgccgacgcggagtttcaggagcgtcttaaagaagatacgtcttttgggggcaacctcggacgagcagtcttccaggcgaaaaagagggttcttgaacctctgggcctggttgaggaacctgttaagacggctccgggaaaaaagaggccggtagagcactctcctgcggagccagactcctcctcgggaaccggaaaagcgggccagcagcctgcaagaaagagattgaatttcggtcagactggagacgcagactccgtacctgacccccagcctctcggacagccaccagcagcccccacaagtttgggatctactacaatggctacaggcagtggcgcaccaatggcagacaataacgagggtaccgatggagtgggtaattcctcaggaaattggcattgcgattcccaatggctgggcgacagagtcatcaccaccagcacccgaacctgggccctgcccacctacaacaaccacctctacaagcaaatctccagccaatcaggagcatcgaacgacaaccactactttggctacagcaccccttgggggtattttgacttcaacagattccactgtcacttctccccacgtgactggcaaagactcatcaacaacaactggggattccgacccaagagactcaacttcaagctctttaacattcaagtcaaagaggtcacgcagaatgacggtacgacgacgattgccaataaccttaccagcacggttcaggtgtttactgactcggagtaccagctcccgtacgtcctcggctcggcgcatcaaggatgcctcccgccgtttccagcggacgtcttcatggtcccacagtatggatacctcaccctgaacaacgggagtcaggcggtaggacgctcttccttttactgcctggagtactttccttctcagatgctgcgtaccggaaacaactttaccttcagctacacctttgaggacgtgcctttccacagcagctacgctcacagccagagtttggaccggctgatgaatcctctgatcgaccagtatctgtattatctgaacaggacacaatcaaatagtggaactcttcagcagtctaggctactgtttagccaagctggacccaccagcatgtctcttcaagctaaaaactggctgcctggaccttgctacagacagcagcgtctgtcaaagcaggcaaacgacaacaacaacagcaactttccctggactgcggctacaaagtatcatctaaatggtcgggactcgttggttaatccaggaccagctatggccagccacaaagacgatgaagaaaagtttttccccatgcatggaaccctgatatttggtaaacaaggaacaaatgctaacgacgcggatttggaacatgtcatgattacagatgaagaagaaatcaggaccaccaatcccgtggctacagagcagtacggaaacgtgtcaaataatttgcaaaactcaaatactggtccaactacagaaaatgtcaatcaccagggagcgttacctggtatggtgtggcaggatcgagacgtgtacctgcagggacccatttgggccaagattcctcacaccgacggacactttcacccttctccactgatgggaggttttggactcaaacacccgcctcctcaaatcatgatcaaaaacactcctgttccagccaatcctcctacaaacttcagcgcggcaaagtttgcttccttcatcacacagtattccacgggacaggtcagcgtggagatcgagtgggagctgcagaaggagaacagcaaacgctggaaccccgagatccagtacacttccaactacaacaaatctgttaatgtggactttactgtggacactaatggtgtgtattcagagcctcgccccattggcaccagatacctgactcgtaatctgtaa

SEQ ID NO: 4481 - DNA, 2208 bp, synthetic construct
  misc_feature 1..2208: note = source = /note="Description of Artificial Sequence: Synthetic polynucleotide"
  source 1..2208: mol_type = other DNA
atggctgccgatggttatcttccagattggctcgaggacactctctctgaaggaataagacagtggtggaagctcaaacctggcccaccaccaccaaagcccgcagagcggcatcaggacgacagcaggggtcttgtgcttcctgggtacaagtacctcggacccttcaacggactcgacaaaggagagccggtcaacgaggcagacgctgcggccctcgagcacgacaaggcctacgaccggcagctcgacagcggagacaacccgtaccccaagtacaaccacgccgacgcggagtttcaggagcgtcttaaagaagatacgtcttttgggggcaacctcggacgagcagtcttccaggcgaaaaagagggttcttgaacctctgggcctggttgaggaacctgttaagacggctccgggaaaaaagaggccggtagagcactctcctgcggagccagactcctcctcgggaaccggaaaagcgggccagcagcctgcaagaaagagattgaatttcggtcagactggagacgcagactccgtacctgacccccagcctctcggacagccaccagcagcccccacaagtttgggatctactacaatggctacaggcagtggcgcaccaatggcagacaataacgagggtgccgatggagtgggtaattcctcaggaaattggcattgcgattcccaatggctgggcgacagagtcatcaccaccagcacccgaacctgggccctgcccacctacaacaaccacctctacaagcaaatctccagccaatcaggagcatcgaacgacaaccactactttggctacagcaccccttgggggtattttgacttcaacagattccactgtcacttctccccacgtgactggcaaagactcatcaacaacaactggggattccgacccaagagactcaacttcaagctctttaacattcaagtcaaagaggtcacgcagaatgacggtacgacgacgattgccaataaccttaccagcacggttcaggtgtttactgactcggagtaccagctcccgtacgtcctcggctcggcgcatcaaggatgcctcccgccgtttccagcggacgtcttcatggtcccacagtatggatacctcaccctgaacaacgggagtcaggcggtaggacgctcttccttttactgcctggagtactttccttctcagatgctgcgtaccggaaacaactttaccttcagctacacctttgaggacgtgcctttccacagcagctacgctcacagccagagtttggaccggctgatgaatcctctgatcgaccagtatctgtattatctgaacaggacacaatcaaatagtggaactcttcagcagtctaggctactgtttagccaagctggacccaccagcatgtctcttcaagctaaaaactggctgcctggaccttgctacagacagcagcgtctgtcaaagcaggcaaacgacaacaacaacagcaactttccctggactgcggctacaaagtatcatctaaatggtcgggactcgttggttaatccaggaccagctatggccagccacaaagacgatgaagaaaagtttttccccatgcatggaaccctgatatttggtaaacaaggaacaaatgctaacgacgcggatttggaacatgtcatgattacagatgaagaagaaatcaggaccaccaatcccgtggctacagagcagtacggaaacgtgtcaaataatttgcaaaactcaaatactggtccaactacagaaaatgtcaatcaccagggagcgttacctggtatggtgtggcaggatcgagacgtgtacctgcagggacccatttgggccaagattcctcacaccgacggacactttcacccttctccactgatgggaggttttggactcaaacacccgcctcctcaaatcatgatcaaaaacactcctgttccagccaatcctcctacaaacttcagcgcggcaaagtttgcttccttcatcacacagtattccacgggacaggtcagcgtggagatcgagtgggagctgcagaaggagaacagcaaacgctggaaccccgagatccagtacacttccaactacaacaaatctgttaatgtggactttactgtggacactaatggtgtgtattcagagcctcgccccattggcaccagatacctgactcgtaatctgtaa

SEQ ID NO: 4482 - DNA, 2208 bp, synthetic construct
  misc_feature 1..2208: note = source = /note="Description of Artificial Sequence: Synthetic polynucleotide"
  source 1..2208: mol_type = other DNA
atggctgccgatggttatcttccagattggctcgaggacactctctctgaaggaataagacagtggtggaagctcaaacctggcccaccaccaccaaagcccgcagagcggcatcaggacgacagcaggggtcttgtgcttcctgggtacaagtacctcggacccttcaacggactcgacaaaggagagccggtcaacgaggcagacgctgcggccctcgagcacgacaaggcctacgaccggcagctcgacagcggagacaacccgtacctcaagtacaaccacgccgacgcggagtttcaggagcgtcttaaagaagatacgtcttttgggggcaacctcggacgagcagtcttccaggcgaaaaagagggttcttgaacctctgggcctggttgaggaacctgttaagacggctccgggaaaaaagaggccggtagagcactctcctgcggagccagactcctcctcgggaaccggaaaagcgggccagcagcctgcaagaaagagattgaatttcggtcagactggagacgcagactccgtacctgacccccagcctctcggacagccaccagcagcccccacaagtttgggatctactacaatggctacaggcagtggcgcaccaatggcagacaataacgagggtgccgatggagtgggtaattcctcaggaaattggcattgcgattcccaatggctgggcgacagagtcatcaccaccagcacccgaacctgggccctgcccacctacaacaaccacctctacaagcaaatctccagccaatcaggagcatcgaacgacaaccactactttggctacagcaccccttgggggtattttgacttcaacagattccactgtcacttctccccacgtgactggcaaagactcatcaacaacaactggggattccgacccaagagactcaacttcaagctctttaacattcaagtcaaagaggtcacgcagaatgacggtacgacgacgattgccaataaccttaccagcacggttcaggtgtttactgactcggagtaccagctcccgtacgtcctcggctcggcgcatcaaggatgcctcccgccgtttccagcggacgtcttcatggtcccacagtatggatacctcaccctgaacaacgggagtcaggcggtaggacgctcttccttttactgcctggagtactttccttctcagatgctgcgtaccggaaacaactttaccttcagctacacctttgaggacgtgcctttccacagcagctacgctcacagccagagtttggaccggctgatgaatcctctgatcgaccagtatctgtattatctgaacaggacacaatcaaatagtggaactcttcagcagtctaggctactgtttagccaagctggacccaccagcatgtctcttcaagctaaaaactggctgcctggaccttgctacagacagcagcgtctgtcaaagcaggcaaacgacaacaacaacagcaactttccctggactgcggctacaaagtatcatctaaatggtcgggactcgttggttaatccaggaccagctatggccagccacaaagacgatgaagaaaagtttttccccatgcatggaaccctgatatttggtaaacaaggaacaaatgctaacgacgcggatttggaacatgtcatgattacagatgaagaagaaatcagggccaccaatcccgtggctacagagcagtacggaaacgtgtcaaataatttgcaaaactcaaatactggtccaactacagaaaatgtcaatcaccagggagcgttacctggtatggtgtggcaggatcgagacgtgtacctgcagggacccatttgggccaagattcctcacaccgacggacactttcacccttctccactgatgggaggttttggactcaaacacccgcctcctcaaatcatgatcaaaaacactcctgttccagccaatcctcctacaaacttcagcgcggcaaagtttgcttccttcatcacacagtattccacgggacaggtcagcgtggagatcgagtgggagctgcagaaggagaacagcaaacgctggaaccccgagatccagtacacttccaactacaacaaatctgttaatgtggactttactgtggacactaatggtgtgtattcagagcctcgccccattggcaccagatacctgactcgtaatctgtaa

SEQ ID NO: 4483 - DNA, 2208 bp, synthetic construct
  misc_feature 1..2208: note = source = /note="Description of Artificial Sequence: Synthetic polynucleotide"
  source 1..2208: mol_type = other DNA
atggctgccgatggttatcttccagattggctcgaggacactctctctgaaggaataagacagtggtggaagctcaaacctggcccaccaccaccaaagcccgcagagcggcatcaggacgacagcaggggtcttgtgcttcctgggtacaagtacctcggacccttcaacggactcgacaaaggagagccggtcaacgaggcagacgctgcggccctcgagcacgacaaggcctacgaccggcagctcgacagcggagacaacccgtacctcaagtacaaccacgccgacgcggagtttcaggagcgtcttaaagaagatacgtcttttgggggcaacctcggacgagcagtcttccaggcgaaaaagagggttcttgaacctctgggcctggttgaggaacctgttaagacggctccgggaaaaaagaggccggtagagcactctcctgcggagccagactcctcctcgggaaccggaaaagcgggccagcagcctgcaagaaagagattgaatttcggtcagactggagacgcagactccgtacctgacccccagcctctcggacagccaccagcagcccccacaagtttgggatctactacaatggctacaggcagtggcgcaccaatggcagacaataacgagggtgccgatggagtgggtaattcctcaggaaattggcattgcgattcccaatggctgggcgacagagtcatcaccaccagcacccgaacctgggccctgcccacctacaacaaccacctctacaagcaaatctccagccaatcaggagcatcgaacgacaaccactactttggctacagcaccccttgggggtattttgacttcaacagattccactgtcgcttctccccacgtgactggcaaagactcatcaacaacaactggggattccgacccaagagactcaacttcaagctctttaacattcaagtcaaagaggtcacgcagaatgacggtacgacgacgattgccaataaccttaccagcacggttcaggtgtttactgactcggagtaccagctcccgtacgtcctcggctcggcgcatcaaggatgcctcccgccgtttccagcggacgtcttcatggtcccacagtatggatacctcaccctgaacaacgggagtcaggcggtaggacgctcttccttttactgcctggagtactttccttctcagatgctgcgtaccggaaacaactttaccttcagctacacctttgaggacgtgcctttccacagcagctacgctcacagccagagtttggaccggctgatgaatcctctgatcgaccagtatctgtattatctgaacaggacacaatcaaatagtggaactcttcagcagtctaggctactgtttagccaagctggacccaccagcatgtctcttcaagctaaaaactggctgcctggaccttgctacagacagcagcgtctgtcaaagcaggcaaacgacaacaacaacagcaactttccctggactgcggctacaaagtatcatctaaatggtcgggactcgttggttaatccaggaccagctatggccagccacaaagacgatgaagaaaagtttttccccatgcatggaaccctgatatttggtaaacaaggaacgaatgctaacgacgcggatttggaacatgtcatgattacagatgaagaagaaatcaggaccaccaatcccgtggctacagagcagtacggaaacgtgtcaaataatttgcaaaactcaaatactggtccaactacagaaaatgtcaatcaccagggagcgttacctggtatggtgtggcaggatcgagacgtgtacctgcagggacccatttgggccaagattcctcacaccgacggacactttcacccttctccactgatgggaggttttggactcaaacacccgcctcctcaaatcatgatcaaaaacactcctgttccagccaatcctcctacaaacttcagcgcggcaaagtttgcttccttcatcacacagtattccacgggacaggtcagcgtggagatcgagtgggagctgcagaaggagaacagcaaacgctggaaccccgagatccagtacacttccaactacaacaaatctgttaatgtggactttactgtggacactaatggtgtgtattcagagcctcgccccattggcaccagatacctgactcgtaatctgtaa

SEQ ID NO: 4484 - DNA, 2208 bp, synthetic construct
  misc_feature 1..2208: note = source = /note="Description of Artificial Sequence: Synthetic polynucleotide"
  source 1..2208: mol_type = other DNA
atggctgccgatggttatcttccagattggctcgaggacactctctctgaaggaataagacagtggtggaagctcaaacctggcccaccaccaccaaagcccgcagagcggcatcaggacgacagcaggggtcttgtgcttcctgggtacaagtacctcggacccttcaacggactcgacaaaggagagccggtcaacgaggcagacgctgcggccctcgagcacgacaaggcctacgaccggcagctcgacagcggagacaacccgtacctcaagtacaaccacgccgacgcggagtttcaggagcgtcttaaagaagatacgtcttttgggggcaacctcggacgagcagtcttccaggcgaaaaagagggttcttgaacctctgggcctggttgaggaacctgttaagacggctccgggaaaaaagaggccggtagagcactctcctgcggagccagactcctcctcgggaaccggaaaagcgggccagcagcctgcaagaaagagattgaatttcggtcagactggagacgcagactccgtacctgacccccagcctctcggacagccaccagcagcccccacaagtttgggatctactacaatggctacaggcagtggcgcaccaatggcagacaataacgagggtgccgatggagtgggtaattcctcaggaaattggcattgcgattcccaatggctgggcgacagagtcatcaccaccagcacccgaacctgggccctgcccacctacaacaaccacctctacaagcaaatctccagccaatcaggagcatcgaacgacaaccactactttggctacagcaccccttgggggtattttgacttcaacagattccactgtcacttctccccacgtgactggcaaagactcatcaacaacaactggggattccgacccaagagactcaacttcaagctctttaacattcaagtcaaagaggtcacgcagaatgacggtacgacgacgattgccaataaccttaccagcacggttcaggtgtttactgactcggagtaccagctcccgtacgtcctcggctcggcgcatcaaggatgcctcccgccgtttccagcggacgtcttcatggtcccacagtatggatacctcaccctgaacaacgggagtcaggcggtaggacgctcttccttttactgcctggagtactttccttctcagatgctgcgtaccggaaacaactttaccttcagctacacctttgaggacgtgcctttccgcagcagctacgctcacagccagagtttggaccggctgatgaatcctctgatcgaccagtatctgtattatctgaacaggacacaatcaaatagtggaactcttcagcagtctaggctactgtttagccaagctggacccaccagcatgtctcttcaagctaaaaactggctgcctggaccttgctacagacagcagcgtctgtcaaagcaggcaaacgacaacaacaacagcaactttccctggactgcggctacaaagtatcatctaaatggtcgggactcgttggttaatccaggaccagctatggccagccacaaagacgatgaagaaaagtttttccccatgcatggaaccctgatatttggtaaacaaggaacaaatgctaacgacgcggatttggaacatgtcatgattacagatgaagaagaaatcaggaccaccaatcccgtggctacagagcagtacggaaacgtgtcaaataatttgcaaaactcaaatactggtccaactacagaaaatgtcaatcaccagggagcgttacctggtatggtgtggcaggatcgagacgtgtacctgcagggacccatttgggccaagattcctcacaccgacggacactttcacccttctccactgatgggaggttttggactcaaacacccgcctcctcaaatcatgatcaaaaacactcctgttccagccaatcctcctacaaacttcagcgcggcaaagtttgcttccttcatcacacagtattccacgggacaggtcagcgtggagatcgagtgggagctgcagaaggagaacagcaaacgctggaaccccgagatccagtacacttccaactacaacaaatctgttaatgtggactttactgtggacactaatggtgtgtattcagagcctcgccccattggcaccagatacctgactcgtaatctgtaa

SEQ ID NO: 4485 - DNA, 2208 bp, synthetic construct
  misc_feature 1..2208: note = source = /note="Description of Artificial Sequence: Synthetic polynucleotide"
  source 1..2208: mol_type = other DNA
atggctgccgatggttatcttccagattggctcgaggacactctctctgaaggaataagacagtggtggaagctcaaacctggcccaccaccaccaaagcccgcagagcggcatcaggacgacagcaggggtcttgtgcttcctgggtacaagtacctcggacccttcaacggactcgacaaaggagagccggtcaacgaggcagacgctgcggccctcgagcacgacaaggcctacgaccggcagctcgacagcggagacaacccgtacctcaagtacaaccacgccgacgcggagtttcaggagcgtcttaaagaagatacgtcttttgggggcaacctcggacgagcagtcttccaggcgaaaaagagggttcttgaacctctgggcctggttgaggaacctgttaagacggctccgggaaaaaagaggccggtagagcactctcctgcggagccagactcctcctcgggaaccggaaaagcgggccagcagcctgcaagaaagagattgaatttcggtcagactggagacgcagactccgtacctgacccccagcctctcggacagccaccagcagcccccacaagtttgggatctactacaatggctacaggcagtggcgcaccaatggcagacaataacgagggtgccgatggagtgggtaattcctcaggaaattggcattgcgattcccaatggctgggcgacagagtcatcaccaccagcacccgaacctgggccctgcccacctacagcaaccacctctacaagcaaatctccagccaatcaggagcatcgaacgacaaccactactttggctacagcaccccttgggggtattttgacttcaacagattccactgtcacttctccccacgtgactggcaaagactcatcaacaacaactggggattccgacccaagagactcaacttcaagctctttaacattcaagtcaaagaggtcacgcagaatgacggtacgacgacgattgccaataaccttaccagcacggttcaggtgtttactgactcggagtaccagctcccgtacgtcctcggctcggcgcatcaaggatgcctcccgccgtttccagcggacgtcttcatggtcccacagtatggatacctcaccctgaacaacgggagtcaggcggtaggacgctcttccttttactgcctggagtactttccttctcagatgctgcgtaccggaaacaactttaccttcagctacacctttgaggacgtgcctttccacagcagctacgctcacagccagagtttggaccggctgatgaatcctctgatcgaccagtatctgtattatctgaacaggacacaatcaaatagtggaactcttcagcagtctaggctactgtttagccaagctggacccaccagcatgtctcttcaagctaaaaactggctgcctggaccttgctacagacagcagcgtctgtcaaagcaggcaaacgacaacaacaacagcaactttccctggactgcggctacaaagtatcatctaaatggtcgggactcgttggttaatccaggaccagctatggccagccacaaagacgatgaagaaaagtttttccccatgcatggaaccctgatatttggtaaacaaggaacaaatgctaacgacgcggatttggaacatgtcatgattacagatgaagaagaaatcaggaccaccaatcccgtggctacagagcagtacggaaacgtgtcaaataatttgcaaaactcaaatactggtccaactacagaaaatgtcaatcaccagggagcgttacctggtatggtgtggcaggatcgagacgtgtacctgcagggacccatttgggccaagattcctcacaccgacggacactttcacccttctccactgatgggaggttttggactcaaacacccgcctcctcaaatcatgatcaaaaacactcctgttccagccaatcctcctacaaacttcagcgcggcaaagtttgcttccttcatcacacagtattccacgggacaggtcagcgtggagatcgagtgggagctgcagaaggagaacagcaaacgctggaaccccgagatccagtacacttccaactacaacaaatctgttaatgtggactttactgtggacactaatggtgtgtattcagagcctcgccccattggcaccagatacctgactcgtaatctgtaa

SEQ ID NO: 4486 - DNA, 2208 bp, synthetic construct
  misc_feature 1..2208: note = source = /note="Description of Artificial Sequence: Synthetic polynucleotide"
  source 1..2208: mol_type = other DNA
atggctgccgatggttatcttccagattggctcgaggacactctctctgaaggaataagacagtggtggaagctcaaacctggcccaccaccaccaaagcccgcagagcggcatcaggacgacagcaggggtcttgtgcttcctgggtacaagtacctcggacccttcaacggactcgacaaaggagagccggtcaacgaggcagacgctgcggccctcgagcacgacaaggcctacgaccggcagctcgacagcggagacaacccgtacctcaagtacaaccacgccgacgcggagtttcaggagcgtcttaaagaagatacgtcttttgggggcaacctcggacgagcagtcttccaggcgaaaaagagggttcttgaacctctgggcctggttgaggaacctgttaagacggctccgggaaaaaagaggccggtagagcactctcctgcggagccagactcctcctcgggaaccggaaaagcgggccagcagcctgcaagaaagagattgaatttcggtcagactggagacgcagactccgtacctgacccccagcctctcggacagccaccagcagcccccacaagtttgggatctactacaatggctacaggcagtggcgcaccaatggcagacaataacgagggtgccgatggagtgggtaattcctcaggaaattggcattgcgattcccaatggctgggcgacagagtcatcaccaccagcacccgaacctgggccctgcccacctacaacaaccacctctacaagcaaatctccagccaatcaggagcatcgaacgacaaccactactttggctacagcaccccttgggggtattttgacttcaacagattccactgtcacttctccccacgtgactggcaaagactcatcaacaacaactggggattccgacccaagagactcaacttcaagccctttaacattcaagtcaaagaggtcacgcagaatgacggtacgacgacgattgccaataaccttaccagcacggttcaggtgtttactgactcggagtaccagctcccgtacgtcctcggctcggcgcatcaaggatgcctcccgccgtttccagcggacgtcttcatggtcccacagtatggatacctcaccctgaacaacgggagtcaggcggtaggacgctcttccttttactgcctggagtactttccttctcagatgctgcgtaccggaaacaactttaccttcagctacacctttgaggacgtgcctttccacagcagctacgctcacagccagagtttggaccggctgatgaatcctctgatcgaccagtatctgtattatctgaacaggacacaatcaaatagtggaactcttcagcagtctaggctactgtttagccaagctggacccaccagcatgtctcttcaagctaaaaactggctgcctggaccttgctacagacagcagcgtctgtcaaagcaggcaaacgacaacaacaacagcaactttccctggactgcggctacaaagtatcatctaaatggtcgggactcgttggttaatccaggaccagctatggccagccacaaagacgatgaagaaaagtttttccccatgcatggaaccctgatatttggtaaacaaggaacaaatgctaacgacgcggatttggaacatgtcatgattacagatgaagaagaaatcaggaccaccaatcccgtggctacagagcagtacggaaacgtgtcaaataatttgcaaaactcaaatactggtccaactacagaaaatgtcaatcaccagggagcgttacctggtatggtgtggcaggatcgagacgtgtacctgcagggacccatttgggccaagattcctcacaccgacggacactttcacccttctccactgatgggaggttttggactcaaacacccgcctcctcaaatcatgatcaaaaacactcctgttccagccaatcctcctacaaacttcagcgcggcaaagtttgcttccttcatcacacagtattccacgggacaggtcagcgtggagatcgagtgggagctgcagaaggagaacagcaaacgctggaaccccgagatccagtacacttccaactacaacaaatctgttaatgtggactttactgtggacactaatggtgtgtattcagagcctcgccccattggcaccagatacctgactcgtaatctgtaa

SEQ ID NO: 4487 - DNA, 2208 bp, synthetic construct
  misc_feature 1..2208: note = source = /note="Description of Artificial Sequence: Synthetic polynucleotide"
  source 1..2208: mol_type = other DNA
atggctgccgatggttatcttccagattggctcgaggacactctctctgaaggaataagacagtggtggaagctcaaacctggcccaccaccaccaaagcccgcagagcggcatcaggacgacagcaggggtcttgtgcttcctgggtacaagtacctcggacccttcaacggactcgacaaaggagagccggtcaacgaggcagacgctgcggccctcgagcacgacaaggcctacgaccggcagctcgacagcggagacaacccgtacctcaagtacaaccacgccgacgcggagtttcaggagcgtcttaaagaagatacgtcttttgggggcaacctcggacgagcagtcttccaggcgaaaaagagggttcttgaacctctgggcctggttgaggaacctgttaagacggctccgggaaaaaagaggccggtagagcactctcctgcggagccagactcctcctcgggaaccggaaaagcgggccagcagcctgcaagaaagagattgaatttcggtcagactggagacgcagactccgtacctgacccccagcctctcggacagccaccagcagcccccacaagtttgggatctactacaatggctacaggcagtggcgcaccaatggcagacaataacgagggtgccgatggagtgggtaattcctcaggaaattggcattgcgattcccaatggctgggcgacagagtcatcaccaccagcacccgaacctgggccctgcccacctacaacaaccacctctacaagcaaatctccagccaatcaggagcatcgaacggcaaccactactttggctacagcaccccttgggggtattttgacttcaacagattccactgtcacttctccccacgtgactggcaaagactcatcaacaacaactggggattccgacccaagagactcaacttcaagctctttaacattcaagtcaaagaggtcacgcagaatgacggtacgacgacgattgccaataaccttaccagcacggttcaggtgtttactgactcggagtaccagctcccgtacgtcctcggctcggcgcatcaaggatgcctcccgccgtttccagcggacgtcttcatggtcccacagtatggatacctcaccctgaacaacgggagtcaggcggtaggacgctcttccttttactgcctggagtactttccttctcagatgctgcgtaccggaaacaactttaccttcagctacacctttgaggacgtgcctttccacagcagctacgctcacagccagagtttggaccggctgatgaatcctctgatcgaccagtatctgtattatctgaacaggacacaatcaaatagtggaactcttcagcagtctaggctactgtttagccaagctggacccaccagcatgtctcttcaagctaaaaactggctgcctggaccttgctacagacagcagcgtctgtcaaagcaggcaaacgacaacaacaacagcaactttccctggactgcggctacaaagtatcatctaaatggtcgggactcgttggttaatccaggaccagctatggccagccacaaagacgatgaagaaaagtttttccccatgcatggaaccctgatatttggtaaacaaggaacaaatgctaacgacgcggatttggaacatgtcatgattacagatgaagaagaaatcaggaccaccaatcccgtggctacagagcagtacggaaacgtgtcaaataatttgcaaaactcaaatactggtccaactacagaaaatgtcaatcaccagggagcgttacctggtatggtgtggcaggatcgagacgtgtacctgcagggacccatttgggccaagattcctcacaccgacggacactttcacccttctccactgatgggaggttttggactcaaacacccgcctcctcaaatcatgatcaaaaacactcctgttccagccaatcctcctacaaacttcagcgcggcaaagtttgcttccttcatcacacagtattccacgggacaggtcagcgtggagatcgagtgggagctgcagaaggagaacagcaaacgctggaaccccgagatccagtacacttccaactacaacaaatctgttaatgtggactttactgtggacactaatggtgtgtattcagagcctcgccccattggcaccagatacctgactcgtaatctgtaa

SEQ ID NO: 4488 - DNA, 2208 bp, synthetic construct
  misc_feature 1..2208: note = source = /note="Description of Artificial Sequence: Synthetic polynucleotide"
  source 1..2208: mol_type = other DNA
atggctgccgatggttatcttccagattggctcgaggacactctctctgaaggaataagacagtggtggaagctcaaacctggcccaccaccaccaaagcccgcagagcggcatcaggacgacagcaggggtcttgtgcttcctgggtacaagtacctcggacccttcaacggactcgacaaaggagagccggtcaacgaggcagacgctgcggccctcgagcacgacaaggcctacgaccggcagctcgacagcggagacaacccgtacctcaagtacaaccacgccgacgcggagtttcaggagcgtcttaaagaagatacgtcttttgggggcaacctcggacgagcagtcttccaggcgaaaaagagggttcttgaacctctgggcctggttgaggaacctgttaagacggctccgggaaaaaagaggccggtagagcactctcctgcggagccagactcctcctcgggaaccggaaaagcgggccagcagcctgcaagaaagagattgaatttcggtcagactggagacgcagactccgtacctgacccccagcctctcggacagccaccagcagcccccacaagtttgggatctactacaatggctacaggcagtggcgcaccaatggcagacaataacgagggtgccgatggagtgggtaattcctcaggaaattggcattgcgattcccaatggctgggcgacagagtcatcaccaccagcacccgaacctgggccctgcccacctacaacaaccacctctacaagcaaatctccagccaatcaggagcatcgaacgacaaccactactttggctacagcaccccttgggggtattttgacttcaacagattccactgtcacttctccccacgtgactggcaaagactcatcaacaacaactggggattccgacccaagagactcaacttcaagctctttaacattcaagtcaaagaggtcacgcagaatgacggtacgacgacgattgccaataaccttaccagcacggttcaggtgtttactgactcggagtaccagctcccgtacgtcctcggctcggcgcatcaaggatgcctcccgccgtttccagcggacgtcttcatggtcccacagtatggatacctcaccctgaacaacgggagtcaggcggtaggacgctcttccttttactgcctggagtactttccttctcagatgctgcgtaccggaaacaactttaccttcagctacacctttgaggacgtgcctttccacagcagctacgctcacagccagagtttggaccggctgatgaatcctctgatcgaccagtatctgtattatctgaacaggacacaatcaaatagtggaactcttcagcagtctaggctactgtttagccaagctggacccaccagcatgtctcttcaagctaaaaactggctgcctggaccttgctacagacagcagcgtctgtcaaagcaggcaaacgacaacaacaacagcaactttccctggactgcggctacaaagtatcatctaaatggtcgggactcgttggttaatccaggaccagctatggccagccacaaagacgatgaagaaaagtttttccccatgcatggaaccctgatatttggtaaacaaggaacaaatgctaacgacgcggatttggaacatgtcatgattacagatgaagaagaaatcaggaccgccaatcccgtggctacagagcagtacggaaacgtgtcaaataatttgcaaaactcaaatactggtccaactacagaaaatgtcaatcaccagggagcgttacctggtatggtgtggcaggatcgagacgtgtacctgcagggacccatttgggccaagattcctcacaccgacggacactttcacccttctccactgatgggaggttttggactcaaacacccgcctcctcaaatcatgatcaaaaacactcctgttccagccaatcctcctacaaacttcagcgcggcaaagtttgcttccttcatcacacagtattccacgggacaggtcagcgtggagatcgagtgggagctgcagaaggagaacagcaaacgctggaaccccgagatccagtacacttccaactacaacaaatctgttaatgtggactttactgtggacactaatggtgtgtattcagagcctcgccccattggcaccagatacctgactcgtaatctgtaa

SEQ ID NO: 4489 - DNA, 2208 bp, synthetic construct
  misc_feature 1..2208: note = source = /note="Description of Artificial Sequence: Synthetic polynucleotide"
  source 1..2208: mol_type = other DNA
atggctgccgatggttatcttccagattggctcgaggacactctctctgaaggaataagacagtggtggaagctcaaacctggcccaccaccaccaaagcccgcagagcggcatcaggacgacagcaggggtcttgtgcttcctgggtacaagtacctcggacccttcaacggactcgacaaaggagagccggtcaacgaggcagacgctgcggccctcgagcacgacaaggcctacgaccggcagctcgacagcggagacaacccgtacctcaagtacaaccacgccgacgcggagtttcaggagcgtcttaaagaagatacgtcttttgggggcaacctcggacgagcagtcttccaggcgaaaaagagggttcttgaacctctgggcctggttgaggaacctgttaagacggctccgggaaaaaagaggccggtagagcactctcctgcggagccagactcctcctcgggaaccggaaaagcgggccagcagcctgcaagaaagagattgaatttcggtcagactggagacgcagactccgtacctgacccccagcctctcggacagccaccagcagcccccacaagtttgggatctactacaatggctacaggcagtggcgcaccaatggcagacaataacgagggtgccgatggagtgggtaattcctcaggaaattggcattgcgattcccaatggctgggcgacagagtcatcaccaccagcacccgaacctgggccctgcccacctacaacaaccacctctacaagcaaatctccagccaatcaggagcatcgaacgacaaccactactttggctacagcaccccttgggggtattttgacttcaacagattccactgtcacttctccccacgtgactggcaaagactcatcaacaacaactggggattccgacccaagagactcaacttcaagctctttaacattcaagtcaaagaggtcacgcagaatgacggtacgacgacgattgccaataaccttaccagcacggttcaggtgtttactgactcggagtaccagctcccgtacgtcctcggctcggcgcatcaaggatgcctcccgccgtttccagcggacgtcttcatggtcccacagtatggatacctcaccctgaacaacgggagtcaggcggtaggacgctcttccttttactgcctggagtactttccttctcagatgctgcgtaccggaaacaactttaccttcagctacacctttgagggcgtgcctttccacagcagctacgctcacagccagagtttggaccggctgatgaatcctctgatcgaccagtatctgtattatctgaacaggacacaatcaaatagtggaactcttcagcagtctaggctactgtttagccaagctggacccaccagcatgtctcttcaagctaaaaactggctgcctggaccttgctacagacagcagcgtctgtcaaagcaggcaaacgacaacaacaacagcaactttccctggactgcggctacaaagtatcatctaaatggtcgggactcgttggttaatccaggaccagctatggccagccacaaagacgatgaagaaaagtttttccccatgcatggaaccctgatatttggtaaacaaggaacaaatgctaacgacgcggatttggaacatgtcatgattacagatgaagaagaaatcaggaccaccaatcccgtggctacagagcagtacggaaacgtgtcaaataatttgcaaaactcaaatactggtccaactacagaaaatgtcaatcaccagggagcgttacctggtatggtgtggcaggatcgagacgtgtacctgcagggacccatttgggccaagattcctcacaccgacggacactttcacccttctccactgatgggaggttttggactcaaacacccgcctcctcaaatcatgatcaaaaacactcctgttccagccaatcctcctacaaacttcagcgcggcaaagtttgcttccttcatcacacagtattccacgggacaggtcagcgtggagatcgagtgggagctgcagaaggagaacagcaaacgctggaaccccgagatccagtacacttccaactacaacaaatctgttaatgtggactttactgtggacactaatggtgtgtattcagagcctcgccccattggcaccagatacctgactcgtaatctgtaa

SEQ ID NO: 4490 - DNA, 2208 bp, synthetic construct
  misc_feature 1..2208: note = source = /note="Description of Artificial Sequence: Synthetic polynucleotide"
  source 1..2208: mol_type = other DNA
atggctgccgatggttatcttccagattggctcgaggacactctctctgaaggaataagacagtggtggaagctcaaacctggcccaccaccaccaaagcccgcagagcggcatcaggacgacagcaggggtcttgtgcttcctgggtacaagtacctcggacccttcaacggactcgacaaaggagagccggtcaacgaggcagacgctgcggccctcgagcacgacaaggcctacgaccggcagctcgacagcggagacaacccgtacctcaagtacaaccacgccgacgcggagtttcaggagcgtcttaaagaagatacgtcttttgggggcaacctcggacgagcagtcttccaggcgaaaaagagggttcttgaacctctgggcctggttgaggaacctgttaagacggctccgggaaaaaagaggccggtagagcactctcctgcggagccagactcctcctcgggaaccggaaaagcgggccagcagcctgcaagaaagagattgaatttcggtcagactggagacgcagactccgtacctgacccccagcctctcggacagccaccagcagcccccacaagtttgggatctactacaatggctacaggcagtggcgcaccaatggcagacaataacgagggtgccgatggagtgggtaattcctcaggaaattggcattgcgattcccaatggctgggcgacagagtcatcaccaccagcacccgaacctgggccctgcccacctacaacaaccacctctacaagcaaatctccagccaatcaggagcatcgaacgacaaccactactttggctacagcaccccttgggggtattttgacttcaacagattccactgtcacttctccccacgtgactggcaaagactcatcaacaacaactggggattccgacccaagagactcaacttcaagctctttaacattcaagtcaaagaggtcacgcagaatgacggtacgacgacgattgccaataaccttaccagcacggttcaggtgtttactgactcggagtaccagctcccgtacgtcctcggctcggcgcatcaaggatgcctcccgccgtttccagcggacgtcttcatggtcccacagtatggatacctcaccctgaacaacgggagtcaggcggtaggacgctcttccttttactgcctggagtactttccttctcagatgctgcgtaccggaaacaactttaccttcagctacacctttgaggacgtgcctttccacagcagctacgctcacagccagagtttggaccggctgatgaatcctctgatcgaccagtatctgtattatctgaacaggacacaatcaaatagtggaactcttcagcagtctaggctactgtttagccaagctggacccaccagcatgtctcttcaagctaaaaactggctgcctggaccttgctacagacagcagcgtctgtcaaagcaggcaaacgacaacaacaacagcaactttccctggactgcggctacaaagtatcatctaaatggtcgggactcgttggttaatccaggaccagctatggccagccacaaagacgatgaagaaaagtttttccccatgcatggaaccctgatatttggtaaacaaggaacaaatgctaacgacgcggatttggaacatgtcatgattacagatgaagaagaaatcaggaccaccaatcccgtggctacagagcagtacggaaacgtgtcaaataatttgcaaaactcaaatactggtccaactacagaaaatgtcaatcaccagggagcgttacctggtatggtgtggcaggatcgagacgtgtacctgcagggacccatttgggccaagattcctcacaccgacggacactttcacccttctccactgatgggaggttttggactcaaacacccgcctcctcaaatcatgatcaaaaacactcctgttccagccaatcctcctacaaacttcagcgcggcaaagtttgcttccttcatcacacagtattccacgggacaggtcagcgtggagatcgagtgggagctgcagaaggagaacagcaaacgctggaaccccgagatccagtacacttccaactacagcaaatctgttaatgtggactttactgtggacactaatggtgtgtattcagagcctcgccccattggcaccagatacctgactcgtaatctgtaa

SEQ ID NO: 4491 - DNA, 2208 bp, synthetic construct
  misc_feature 1..2208: note = source = /note="Description of Artificial Sequence: Synthetic polynucleotide"
  source 1..2208: mol_type = other DNA
atggctgccgatggttatcttccagattggctcgaggacactctctctgaaggaataagacagtggtggaggctcaaacctggcccaccaccaccaaagcccgcagagcggcatcaggacgacagcaggggtcttgtgcttcctgggtacaagtacctcggacccttcaacggactcgacaaaggagagccggtcaacgaggcagacgctgcggccctcgagcacgacaaggcctacgaccggcagctcgacagcggagacaacccgtacctcaagtacaaccacgccgacgcggagtttcaggagcgtcttaaagaagatacgtcttttgggggcaacctcggacgagcagtcttccaggcgaaaaagagggttcttgaacctctgggcctggttgaggaacctgttaagacggctccgggaaaaaagaggccggtagagcactctcctgcggagccagactcctcctcgggaaccggaaaagcgggccagcagcctgcaagaaagagattgaatttcggtcagactggagacgcagactccgtacctgacccccagcctctcggacagccaccagcagcccccacaagtttgggatctactacaatggctacaggcagtggcgcaccaatggcagacaataacgagggtgccgatggagtgggtaattcctcaggaaattggcattgcgattcccaatggctgggcgacagagtcatcaccaccagcacccgaacctgggccctgcccacctacaacaaccacctctacaagcaaatctccagccaatcaggagcatcgaacgacaaccactactttggctacagcaccccttgggggtattttgacttcaacagattccactgtcacttctccccacgtgactggcaaagactcatcaacaacaactggggattccgacccaagagactcaacttcaagctctttaacattcaagtcaaagaggtcacgcagaatgacggtacgacgacgattgccaataaccttaccagcacggttcaggtgtttactgactcggagtaccagctcccgtacgtcctcggctcggcgcatcaaggatgcctcccgccgtttccagcggacgtcttcatggtcccacagtatggatacctcaccctgaacaacgggagtcaggcggtaggacgctcttccttttactgcctggagtactttccttctcagatgctgcgtaccggaaacaactttaccttcagctacacctttgaggacgtgcctttccacagcagctacgctcacagccagagtttggaccggctgatgaatcctctgatcgaccagtatctgtattatctgaacaggacacaatcaaatagtggaactcttcagcagtctaggctactgtttagccaagctggacccaccagcatgtctcttcaagctaaaaactggctgcctggaccttgctacagacagcagcgtctgtcaaagcaggcaaacgacaacaacaacagcaactttccctggactgcggctacaaagtatcatctaaatggtcgggactcgttggttaatccaggaccagctatggccagccacaaagacgatgaagaaaagtttttccccatgcatggaaccctgatatttggtaaacaaggaacaaatgctaacgacgcggatttggaacatgtcatgattacagatgaagaagaaatcaggaccaccaatcccgtggctacagagcagtacggaaacgtgtcaaataatttgcaaaactcaaatactggtccaactacagaaaatgtcaatcaccagggagcgttacctggtatggtgtggcaggatcgagacgtgtacctgcagggacccatttgggccaagattcctcacaccgacggacactttcacccttctccactgatgggaggttttggactcaaacacccgcctcctcaaatcatgatcaaaaacactcctgttccagccaatcctcctacaaacttcagcgcggcaaagtttgcttccttcatcacacagtattccacgggacaggtcagcgtggagatcgagtgggagctgcagaaggagaacagcaaacgctggaaccccgagatccagtacacttccaactacaacaaatctgttaatgtggactttactgtggacactaatggtgtgtattcagagcctcgccccattggcaccagatacctgactcgtaatctgtaa

SEQ ID NO: 4492 - DNA, 2208 bp, synthetic construct
  misc_feature 1..2208: note = source = /note="Description of Artificial Sequence: Synthetic polynucleotide"
  source 1..2208: mol_type = other DNA
atggctgccgatggttatcttccagattggctcgaggacactctctctgaaggaataagacagtggtggaagctcaaacctggcccaccaccgccaaagcccgcagagcggcacaaggacgacagtaggggtcttgtgcttcctgggtacaagtacctcggacccttcaacggactcgacaaaggagagccggtcaacgaggcagacgccgcggccctcgagcacgacaaggcctacgaccggcagctcgacagcggagacaacccgtacctcaagtacaaccacgccgacgcggagtttcaggagcgtcttaaagaagatacgtcttttgggggcaacctcggacgagcagtattccaggcgaaaaagagggttcttgaacctctgggcctggttgaggagcctgttaagacggctccgggaaaaaagaggccggtagagcactctcctgtggagccagactcctcctcgggaaccggaaaagcgggccagcagcctgcaagaaaaagattgaattttggtcagactggagacgcagactccgtacctgacccccagcctctcggacagccaccagcagcccccacaagtttgggatctactacaatggctacaggcagtggcgcaccaatggcagacaataacgagggtgccgatggagtgggtaattcctcaggaaattggcattgcgattcccaatggctgggcgacagagtcatcaccaccagcacccgaacctgggccctgcccacctacaacaaccacctctacaagcaaatctccagccaatcaggagcatcgaacgacaaccactactttggccacagcaccccttgggggtattttgacttcaacagattccactgtcacttctccccacgtgactggcaaagactcatcaacaacaactggggattccgacccaagagactcaacttcaagctctttaacattcaagtcaaagaggtcacgcagaatgacggtacgacgacgattgccaataaccttaccagcacggttcaggtgtttactgactcggagtaccagctcccgtacgtcctcggctcggcgcatcaaggatgcctcccgccgttcccagcagacgtcttcatggtcccacagtatggatacctcaccctgaacaacgggagtcaggcggtaggacgctcttccttttactgcctggagtactttccttctcagatgcttcgtaccggaaacaactttaccttcagctacacctttgaagacgtgcctttccacagtagctacgctcacagccagagtctggatcggctgatgaatcctcttatcgaccagtacctgtattatctaaacaaaacacaatcaaatagtggaactcttcagcagtctcggctactgtttagtcaagctggacccaccagcatgtctcttcaagctaaaaactggctgcctggaccttgctacagacaacagcgtctgtcaaagcaggcaaacgacaacaacaacagcaactttccctggactgcggctacaaagtatcatctaaatggccgggactcgttggttaatccaggaccagctatggccagccacaaagacgatgaagaaaagtttttccccatgcatggaaccctgatatttggtaaacaaggaacaaatgctaacgacgcggatttggacaatgtcatgattacagatgaagaagaaatccgcaccaccaatcccgtggctacggagcagtacgggactgtgtcaaataatttgcaaaactcaaatactggtccaactactggaactgtcaatcaccaaggagcgttacctggtatggtgtggcaggatcgagacgtgtacctgcagggacccatttgggccaagattcctcacaccgatggacactttcatccttctccactgatgggaggttttggactcaaacacccgcctcctcagatcatgatcaaaaacactcccgttccagccaatcctcctacaaacttcagttctgccaagtctgcttccttcatcacacagtattccacgggacaagtcagcgtggagattgagtgggagctgcagaaggagaacagcaaacgctggaaccccgagatccagtacacttccaactacaacaaatctgttaatgtggactttactgtggacactaatggcgtgtattcagagcctcgccccattggcaccagatacctgactcgtaatctgtaa

SEQ ID NO: 4493 - DNA, 2208 bp, synthetic construct
  misc_feature 1..2208: note = source = /note="Description of Artificial Sequence: Synthetic polynucleotide"
  source 1..2208: mol_type = other DNA
atggctgccgatggttatcttccagattggctcgaggacactctctctgaaggaataagacagtggtggaagctcaaacctggcccaccaccgccaaagcccgcagagcggcacaaggacgacagtaggggtcttgtgcttcctgggtacaagtacctcggacccttcaacggactcgacaaaggagagccggtcaacgaggcagacgccgcggccctcgagcacgacaaggcctacgaccggcagctcgacagcggagacaacccgtacctcaagtacaaccacgccgacgcggagtttcaggagcgtcttaaagaagatacgtcttttgggggcaacctcggacgagcagtcttccaggcgaaaaagagggttcttgaacctctgggcctggttgaggaacctgttaagacggctccgggaaaaaagaggccggtagagcactctcctgtggagccagactcctcctcgggaaccggaaaggcgggccagcagcctgcaagaaaaagattgaattttggtcagactggagacgcagactcagtacctgacccccagcctctcggacagccaccagcagccccctctggtctgggaactaatacgatggctacaggcagtggcgcaccaatggcagacaataacgagggcgccgacggagtgggtaattcctcgggaaattggcattgcgattccacatggatgggcgacagagtcatcaccaccagcacccgaacctgggccctgcccacctacaacaaccacctctacaaacaaatttccagccaatcaggagcctcgaacgacaatcactactttggctacagcaccccttgggggtattttgacttcaacagattccactgccacttttcaccacgtgactggcaaagactcatcaacaacaactggggattccgacccaagagactcaacttcaagctctttaacattcaagtcaaagaggtcacgcagaatgacggtacgacgacgattgccaataaccttaccagcacggttcaggtgtttactgactcggagtaccagctcccgtacgtcctcggctcggcgcatcaaggatgcctcccgccgttcccagcagacgtcttcatggtcccacagtatggatacctcaccctgaacaacgggagtcaggcggtaggacgctcttccttttactgcctggagtactttccttctcagatgcttcgtaccggaaacaactttaccttcagctacacctttgaagacgtgcctttccacagtagctacgctcacagccagagtctggatcggctgatgaatcctcttatcgaccagtacctgtattatctaaacaaaacacaatcaaatagtggaactcttcagcagtctcggctactgtttagtcaagctggacccaccagcatgtctcttcaagctaaaaactggctgcctggaccttgctacagacaacagcgtctgtcaaagcaggcaaacgacaacaacaacagcaactttccctggactgcggctacaaagtatcatctaaatggccgggactcgttggttaatccaggaccagctatggccagccacaaagacgatgaagaaaagtttttccccatgcatggaaccctgatatttggtaaacaaggaacaaatgctaacgacgcggatttggacaatgtcatgattacagatgaagaagaaatccgcaccaccaatcccgtggctacggagcagtacgggactgtgtcaaataatttgcaaaactcaaatactggtccaactactggaactgtcaatcaccaaggagcgttacctggtatggtgtggcaggatcgagacgtgtacctgcagggacccatttgggccaagattcctcacaccgatggacactttcatccttctccactgatgggaggttttggactcaaacacccgcctcctcagatcatgatcaaaaacactcccgttccagccaatcctcctacaaacttcagttctgccaagtttgcttccttcatcacacagtattccacgggacaagtcagcgtggagattgagtgggagctgcagaaggagaacagcaaacgctggaaccccgagatccagtacacttccaactacaacaaatctgttaatgtggactttactgtggacactaatggcgtgtattcagagcctcgccccattggcaccagatacctgactcgtaatctgtaa

SEQ ID NO: 4494 - DNA, 2208 bp, synthetic construct
  misc_feature 1..2208: note = source = /note="Description of Artificial Sequence: Synthetic polynucleotide"
  source 1..2208: mol_type = other DNA
atggctgccgatggttatcttccagattggctcgaggacactctccctgaaggaataagacagtggtggaagctcaaacctggcccaccaccgccaaagcccgcagagcggcacaaggacgacagtaggggtcttgtgcttcctgggtacaagtacctcggacccttcaacggactcgacaaaggagagccggtcaacgaggcagacgccgcggccctcgagcacgacaaggcctacgaccggcagctcgacagcggagacaacccgtacctcaagtacaaccacgccgacgcggagtttcaggagcgtcttaaagaagatacgtcttttgggggcaacctcggacgagcagtattccaggcgaaaaagagggttcttgaacctctgggcctggttgaggagcctgttaagacggctccgggaaaaaagaggccggtagagcactctcctgtggagccagactcctcctcgggaaccggaaaagcgggccagcagcctgcaagaaaaagattgaattttggtcagactggagacgcagactccgtacctgacccccagcctctcggacagccaccagcagcccccacaagtttgggatctactacaatggctacaggcagtggcgcaccaatggcagacaataacgagggtgccgatggagtgggtaattcctcaggaaattggcattgcgattcccaatggctgggcgacagagtcatcaccaccagcacccgaacctgggccctgcccacctacaacaaccacctctacaagcaaatctccagccaatcaggagcatcgaacgacaaccactactttggccacagcaccccttgggggtattttgacttcaacagattccactgtcacttctccccacgtgactggcaaagactcatcaacaacaactggggattccgacccaagagactcaacttcaagctctttaacattcaagtcaaagaggtcacgcagaatgacggtacgacgacgattgccaataaccttaccagcacggttcaggtgtttactgactcggagtaccagctcccgtacgtcctcggctcggcgcatcaaggatgcctcccgccgttcccagcagacgtcttcatggtcccacagtatggatacctcaccctgaacaacgggagtcaggcggtaggacgctcttccttttactgcctggagtactttccttctcagatgcttcgtaccggaaacaactttaccttcagctacacctttgaagacgtgcctttccacagtagctacgctcacagccagagtctggatcggctgatgaatcctcttatcgaccagtacctgtattatctaaacaaaacacaatcaaatagtggaactcttcagcagtctcggctactgtttagtcaagctggacccaccagcatgtctcttcaagctaaaaactggctgcctggaccttgctacagacaacagcgtctgtcaaagcaggcaaacgacaacaacaacagcaactttccctggactgcggctacaaagtatcatctaaatggccgggactcgttggttaatccaggaccagctatggccagccacaaagacgatgaagaaaagtttttccccatgcatggaaccctgatatttggtaaacaaggaacaaatgctaacgacgcggatttggacaatgtcatgattacagatgaagaagaaatccgcaccaccaatcccgtggctacggagcagtacgggactgtgtcaaataatttgcaaaactcaaatactggtccaactactggaactgtcaatcaccaaggagcgttacctggtatggtgtggcaggatcgagacgtgtacctgcagggacccatttgggccaagattcctcacaccgatggacactttcatccttctccactgatgggaggttttggactcaaacacccgcctcctcagatcatgatcaaaaacactcccgttccagccaatcctcctacaaacttcagttctgccaagtttgcttccttcatcacacagtattccacgggacaagtcagcgtggagattgagtgggagctgcagaaggagaacagcaaacgctggaaccccgagatccagtacacttccaactacaacaaatctgttaatgtggactttactgtggacactaatggcgtgtattcagagcctcgccccattggcaccagatacctgactcgtaatctgtaa

SEQ ID NO: 4495 - DNA, 2208 bp, synthetic construct
  misc_feature 1..2208: note = source = /note="Description of Artificial Sequence: Synthetic polynucleotide"
  source 1..2208: mol_type = other DNA
atggctgccgatggttatcttccagattggctcgaggacactctctctgaaggaataagacagtggtggaagctcaaacctggcccaccaccgccaaagcccgcagagcggcacaaggacgacagtaggggtcttgtgcttcctgggtacaagtacctcggacccttcaacggactcgacaaaggagagccggtcaacgaggcagacgccgcggccctcgagcacgacaaggcctacgaccggcagctcgacagcggagacaacccgtacctcaagtacaaccacgccgacgcggagtttcaggagcgtcttaaagaagatacgtcttttgggggcaacctcggacgagcagtattccaggcgaaaaagagggttcttgaacctctgggcctggttgaggagcctgttaagacggctccgggaaaaaagaggccggtagagcactctcctgtggagccagactcctcctcgggaaccggaaaagcgggccagcagcctgcaagaaaaagattgaattttggtcagactggagacgcagactccgtacctgacccccagcctctcggacagacaccagcagcccccacaagtttgggatctactacaatggctacaggcagtggcgcaccaatggcagacaataacgagggtgccgatggagtgggtaattcctcgggaaattggcattgcgattcccaatggctgggcgacagagtcatcaccaccagcacccgaacctgggccctgcccacctacaacaaccacctctacaagcaaatctccagccaatcaggagcatcgaacgacaaccactactttggctacagcaccccttgggggtattttgacttcaacagattccactgtcacttctccccacgtgactggcaaagactcatcaacaacaactggggattccgacccaagagactcaacttcaagctctttaacattcaagtcaaagaggtcacgcagaatgacggtacgacgacgattgccaataaccttaccagcacggttcaggtgtttactgactcggagtaccagctcccgtacgtcctcggctcggcgcatcaaggatgcctcccgccgttcccagcagacgtcttcatggtcccacagtatggatacctcaccctgaacaacgggagtcaggcggtaggacgctcttccttttactgcctggagtactttccttctcagatgcttcgtaccggaaacaactttaccttcagctacacctttgaagacgtgcctttccacagtagctacgctcacagccagagtctggatcggctgatgaatcctcttatcgaccagtacctgtattatctaaacaaaacacaatcaaatagtggaactcttcagcagtctcggctactgtttagtcaagctggacccaccagcatgtctcttcaagctaaaaactggctgcctggaccttgctacagacaacagcgtctgtcaaagcaggcaaacgacaacaacaacagcaactttccctggactgcggctacaaagtatcatctaaatggccgggactcgttggttaatccaggaccagctatggccagccacaaagacgatgaagaaaagtttttccccatgcatggaaccctgatatttggtaaacaaggaacaaatgctaacgacgcggatttggacaatgtcatgattacagatgaagaagaaatccgcaccaccaatcccgtggctacggagcagtacgggactgtgtcaaataatttgcaaaactcaaatactggtccaactactggaactgtcaatcaccaaggagcgttacctggtatggtgtggcaggatcgagacgtgtacctgcagggacccatttgggccaagattcctcacaccgatggacactttcatccttctccactgatgggaggttttggactcaaacacccgcctcctcagatcatgatcaaaaacactcccgttccagccaatcctcctacaaacttcagttctgccaagtttgcttccttcatcacacagtattccacaggacaagtcggcgtggagattgagtgggagctgcagaaggagaacagcaaacgctggaaccccgagatccagtacacttccaactacaacaaatctgttaatgtggactttactgtggacactaatggcgtgtattcagagcctcgccccattggcaccagatacctgactcgtaatctgtaa

SEQ ID NO: 4496 - DNA, 2208 bp, synthetic construct
  misc_feature 1..2208: note = source = /note="Description of Artificial Sequence: Synthetic polynucleotide"
  source 1..2208: mol_type = other DNA
atggctgccgatggttatcttccagattggctcgaggacactctctctgaaggaataagacagtggtggaagctcaaacctggcccaccaccgccaaagcccgcagagcggcacaaggacgacagtaggggtcttgtgcttcctgggtacaagtacctcggacccttcaacggactcgacaaaggagagccggtcaacgaggcagacgccgcggccctcgagcacgacaaggcctacgaccggcagctcgacagcggagacaacccgtacctcaagtacaaccacgccgacgcggagtttcaggagcgtcttaaagaagatacgtcttttgggggcaacctcggacgagcagtattccaggcgaaaaagagggttcttgaacctctgggcctggttgaggagcctgttaagacggctccgggaaaaaagaggccggtagagcactctcctgtggagccagactcctcctcgggaaccggaaaagcgggccagcagcctgcaagaaaaagattgaattttggtcagactggagacgcagactccgtacctgacccccagcctctcggacagacaccagcagcccccacaagtttgggatctactacaatggctacaggcagtggcgcaccaatggcagacaataacgagggtgccgatggagtgggtaattcctcgggaaattggcattgcgattcccaatggctgggcgacagagtcatcaccaccagcacccgaacctgggccctgcccacctacaacaaccacctctacaagcaaatctccagccaatcaggagcatcgaacgacaaccactactttggctacagcaccccttgggggtattttgacttcaacagattccactgtcacttctccccacgtgactggcaaagactcatcaacaacaactggggattccgacccaagagactcaacttcaagctctttaacattcaagtcaaagaggtcacgcagaatgacggtacgacgacgattgccaataaccttaccagcacggttcaggtgtttactgactcggagtaccagctcccgtacgtcctcggctcggcgcatcaaggatgcctcccgccgttcccagcagacgtcttcatggtcccacagtatggatacctcaccctgaacaacgggagtcaggcggtaggacgctcttccttttactgcctggagtactttccttctcagatgcttcgtaccggaaacaactttaccttcagctacacctttgaagacgtgcctttccacagtagctacgctcacagccagagtctggatcggctgatgaatcctcttatcgaccagtacctgtattatctaaacaaaacacaatcaaatagtggaactcttcagcagtctcggctactgtttagtcaagctggacccaccagcatgtctcttcaagctaaaaactggctgcctggaccttgctacagacaacagcgtctgtcaaagcaggcaaacgacaacaacaacagcaactttccctggactgcggctacaaagtatcatctaaatggccgggactcgttggttaatccaggaccagctatggccagccacaaagacgatgaagaaaagtttttccccatgcatggaaccctgatatttggtaaacaaggaacaaatgctaacgacgcggatttggacaatgtcatgattacagatgaagaagaaatccgcaccaccaatcccgtggctacggagcagtacgggactgtgtcaaataatttgcaaaactcaaatactggtccaactactggaactgtcaatcaccaaggagcgttacctggtatggtgtggcaggatcgagacgtgtacctgcagggacccatttgggccaagattcctcacaccgatggacactttcatccttctccactgatgggaggttttggactcaaacacccgcctcctcagatcatgatcaaaaacactcccgttccagccaatcctcctacaaacttcagttctgccaagtttgcttccttcatcacacagtattccacgggacaagtcagcgtggagattgagtgggagctgcagaaggagaacagcaaacgctggaaccccgagatccagtacacttccaactacaacaaatctgttaatgtggactttactgtggacactaatggcgtgtattcagagcctcgccccattggcaccagatacctgactcgtaatctgtaa

SEQ ID NO: 4497 - DNA, 2208 bp, synthetic construct
  misc_feature 1..2208: note = source = /note="Description of Artificial Sequence: Synthetic polynucleotide"
  source 1..2208: mol_type = other DNA
atggctgccgatggttatcttccagattggctcgaggacactctctctgaaggaataagacagtggtggaagctcaaacctggcccaccaccgccaaagcccgcagagcggcacaaggacgacagtaggggtcttgtgcttcctgggtacaagtacctcggacccttcaacggactcgacaaaggagagccggtcaacgaggcagacgccgcggccctcgagcacgacaaggcctacgaccggcagctcgacagcggagacaacccgtacctcaagtacaaccacgccgacgcggagtttcaggagcgtcttaaagaagatacgtcttttgggggcaacctcggacgagcagtattccaggcgaaaaagagggttcttgaacctctgggcctggttgaggagcctgttaagacggctccgggaaaaaagaggccggtagagcactctcctgtggagccagactcctcctcgggaaccggaaaagcgggccagcagcctgcaagaaaaagattgaattttggtcagactggagacgcagactccgtacctgacccccagcctctcggacagccaccagcagcccccacaagtttgggatctactacaatggctacaggcagtggcgcaccaatggcagacaataacgagggtgccgatggagtgggtaattcctcaggaaatcggcattgcgattcccaatggctgggcgacagagtcatcaccaccagcacccgaacctgggccctgcccacctacaacaaccacctctacaagcaaatctccagccaatcaggagcatcgaacgacaaccactactttggccacagcaccccttgggggtattttgacttcaacagattccactgtcacttctccccacgtgactggcaaagactcatcaacaacaactggggattccgacccaagagactcaacttcaagctctttaacattcaagtcaaagaggtcacgcagaatgacggtacgacgacgattgccaataaccttaccagcacggttcaggtgtttactgactcggagtaccagctcccgtacgtcctcggctcggcgcatcaaggatgcctcccgccgttcccagcagacgtcttcatggtcccacagtatggatacctcaccctgaacaacgggagtcaggcggtaggacgctcttccttttactgcctggagtactttccttctcagatgcttcgtaccggaaacaactttaccttcagctacacctttgaagacgtgcctttccacagtagctacgctcacagccagagtctggatcggctgatgaatcctcttatcgaccagtacctgtattatctaaacaaaacacaatcaaatagtggaactcttcagcagtctcggctactgtttagtcaagctggacccaccagcatgtctcttcaagctaaaaactggctgcctggaccttgctacagacaacagcgtctgtcaaagcaggcaaacgacaacaacaacagcaactttccctggactgcggctacaaagtatcatctaaatggccgggactcgttggttaatccaggaccagctatggccagccacaaagacgatgaagaaaagtttttccccatgcatggaaccctgatatttggtaaacaaggaacaaatgctaacgacgcggatttggacaatgtcatgattacagatgaagaagaaatccgcaccaccaatcccgtggctacggagcagtacgggactgtgtcaaataatttgcaaaactcaaatactggtccaactactggaactgtcaatcaccaaggagcgttacctggtatggtgtggcaggatcgagacgtgtacctgcagggacccatttgggccaagattcctcacaccgatggacactttcatccttctccactgatgggaggttttggactcaaacacccgcctcctcagatcatgatcaaaaacactcccgttccagccaatcctcctacaaacttcagttctgccaagtttgcttccttcatcacacagtattccacgggacaagtcagcgtggagattgagtgggagctgcagaaggagaacagcaaacgctggaaccccgagatccagtacacttccaactacaacaaatctgttaatgtggactttactgtggacactaatggcgtgtattcagagcctcgccccattggcaccagatacctgactcgtaatctgtaa

SEQ ID NO: 4498 - DNA, 2208 bp, synthetic construct
  misc_feature 1..2208: note = source = /note="Description of Artificial Sequence: Synthetic polynucleotide"
  source 1..2208: mol_type = other DNA
atggctgccgatggttatcttccagattggctcgaggacactctctctgaaggaataagacagtggtggaagctcaaacctggcccaccaccgccaaagcccgcagagcggcacaaggacgacagtaggggtcttgtgcttcctgggtacaagtacctcggacccttcaacggactcgacaaaggagagccggtcaacgaggcagacgccgcggccctcgagcacgacaaggcctacgaccggcagctcgacagcggagacaacccgtacctcaagtacaaccacgccgacgcggagtttcaggagcgtcttaaagaagatacgtcttttgggggcaacctcggacgagcagtattccaggcgaaaaagagggttcttgaacctctgggcctggttgaggagcctgttaagacggctccgggaaaaaagaggccggtagagcactctcctgtggagccagactcctcctcgggaaccggaaaagcgggccagcagcctgcaagaaaaagattgaattttggtcagactggagacgcagactccgtacctgacccccagcctctcggacagccaccagcagcccccacaagtttgggatctactacaatggctacaggcagtggcgcaccaatggcagacaataacgagggtgccgatggagtgggtaattcctcaggaaattggcattgcgattcccaatggctgggcgacagagtcatcaccaccagcacccgaacctgggccctgcccacctacaacaaccacctctacaagcaaatctccagccaatcaggagcatcgaacgacaaccactactttggctacagcaccccttgggggtattttgacttcaacagattccactgtcacttctccccacgtgactggcaaagactcatcaacaacaactggggattccgacccaagagactcaacttcaagctctttaacattcaagtcaaagaggtcacgcagaatgacggtacgacgacgattgccaataaccttaccagcacggttcaggtgtttactgactcggagtaccagctcccgtacgtcctcggctcggcgcatcaaggatgcctcccgccgttcccagcagacgtcttcatggtcccacagtatggatacctcaccctgaacaacgggagtcaggcggtaggacgctcttccttttactgcctggagtactttccttctcagatgcctcgtaccggaaacaactttaccttcagctacacctttgaagacgtgcctttccacagtagctacgctcacagccagagtctggatcggctgatgaatcctcttatcgaccagtacctgtattatctaaacaaaacacaatcaaatagtggaactcttcagcagtctcggctactgtttagtcaagctggacccaccagcatgtctcttcaagctaaaaactggctgcctggaccttgctacagacaacagcgtctgtcaaagcaggcaaacgacaacaacaacagcaactttccctggactgcggctacaaagtatcatctaaatggccgggactcgttggttaatccaggaccagctatggccagccacaaagacgatgaagaaaagtttttccccatgcatggaaccctgatatttggtaaacaaggaacaaatgctaacgacgcggatttggacaatgtcatgattacagatgaagaagaaatccgcaccaccaatcccgtggctacggagcagtacgggactgtgtcaaataatttgcaaaactcaaatactggtccaactactggaactgtcaatcaccaaggagcgttacctggtatggtgtggcaggatcgagacgtgtacctgcagggacccatttgggccaagattcctcacaccgatggacactttcatccttctccactgatgggaggttttggactcaaacacccgcctcctcagatcatgatcaaaaacactcccgttccagccaatcctcctacaaacttcagttctgccaagtttgcttccttcatcacacagtattccacgggacaagtcagcgtggagattgagtgggagctgcagaaggagaacagcaaacgctggaaccccgagatccagtacacttccaactacaacaaatctgttaatgtggactttactgtggacactaatggcgtgtattcagagcctcgccccattggcaccagatacctgactcgtaatctgtaa

SEQ ID NO: 4499 - DNA, 2208 bp, synthetic construct
  misc_feature 1..2208: note = source = /note="Description of Artificial Sequence: Synthetic polynucleotide"
  source 1..2208: mol_type = other DNA
atggctgccgatggttatcttccagattggctcgaggacactctctctgaaggaataagacagtggtggaagctcaaacctggcccaccaccgccaaagcccgcagagcggcacaaggacgacagtaggggtcttgtgcttcctgggtacaagtacctcggacccttcaacggactcgacaaaggagagccggtcaacgaggcagacgccgcggccctcgagcacgacaaggcctacgaccggcagctcgacagcggagacaacccgtacctcaagtacaaccacgccgacgcggagtttcaggagcgtcttaaagaagatacgtcttttgggggcaacctcggacgagcagtattccaggcgaaaaagagggttcttgaacctctgggcctggttgaggagcctgttaagacggctccgggaaaaaagaggccggtagagcactctcctgtggagccagactcctcctcgggaaccggaaaagcgggccagcagcctgcaagaaaaagattgaattttggtcagactggagacgcagactccgtacctgacccccagcctctcggacagccaccagcagcccccacaagtttgggatctactacaatggctacaggcagtggcgcaccaatggcagacaataacgagggtgccgatggagtgggtaattcctcgggaaattggcattgcgattcccaatggctgggcgacagagtcatcaccaccagcacccgaacctgggccctgcccacctacaacaaccacctctacaagcaaatctccagccaatcaggagcatcgaacgacaaccactactttggctacagcaccccttgggggtattttgacttcaacagattccactgtcacttctccccacgtgactggcaaagactcatcaacaacaactggggattccgacccaagagactcaacttcaagctctttaacattcaagtcaaagaggtcacgcagaatgacggtacgacgacgattgccaataaccttaccagcacggttcaggtgtttactgactcggagtaccagctcccgtacgtcctcggctcggcgcatcaaggatgcctcccgccgttcccagcagacgtcttcatggtcccacagtatggatacctcaccctgaacaacgggagtcaggcggtaggacgctcttccttttactgcctggagtactttccttctcagatgcttcgtaccggaaacaactttaccttcagctacacctttgaagacgtgcctttccacagtagctacgctcacagccagagtctggatcggctgatgaatcctcttatcgaccagtacctgtattatctaaacaaaacacaatcaaatagtggaactcttcagcagtctcggctactgtttagtcaagctggacccaccagcatgtctcttcaagctaaaaactggctgcctggaccttgctacagacaacagcgtctgtcaaagcaggcaaacgacaacaacaacagcaactttccctggactgcggctacaaagtatcatctaaatggccgggactcgttggttaatccaggaccagctatggccagccacaaagacgatgaagaaaagtttttccccatgcatggaaccctgatatttggtaaacaaggaacaaatgctaacgacgcggatttggacaatgtcatgattacagatgaagaagaaatccgcaccaccaatcccgtggctacggagcagtacgggactgtgtcaaataatttgcaaaactcaaatactggtccaactactggaactgtcaatcaccaaggagcgttacctggtatggtgtggcaggatcgagacgtgtacctgcagggacccatttgggccaagattcctcacaccgatggacactttcatccttctccactgatgggaggttttggactcaaacacccgcctcctcagatcatgatcaaaaacactcccgttccagccaatcctcctacaaacttcagttctgccaagtctgcttccttcatcacacagtattccacgggacaagtcagcgtggagattgagtgggagctgcagaaggagaacagcaaacgctggaaccccgagatccagtacacttccaactacaacaaatctgttaatgtggactttactgtggacactaatggcgtgtattcagagcctcgccccattggcaccagatacctgactcgtaatctgtaa

SEQ ID NO: 4500 - DNA, 2208 bp, synthetic construct
  misc_feature 1..2208: note = source = /note="Description of Artificial Sequence: Synthetic polynucleotide"
  source 1..2208: mol_type = other DNA
atggctgccgatggttatcttccagattggctcgaggacactctctctgaaggaataagacagtggtggaagctcaaacctggcccaccaccgccaaagcccgcagagcggcacaaggacgacagtaggggtcttgtgcttcctgggtacaagtacctcggacccttcaacggactcgacaaaggagagccggtcaacgaggcagacgccgcggccctcgagcacgacaaggcctacgaccggcagctcgacagcggagacaacccgtacctcaagtacaaccacgccgacgcggagtttcaggagcgtcttaaagaagatacgtcttttgggggcaacctcggacgagcagtattccaggcgaaaaagagggttcttgaacctctgggcctggttgaggagcctgttaagacggctccgggaaaaaagaggccggtagagcactctcctgtggagccagactcctcctcgggaaccggaaaagcgggccagcagcctgcaagaaaaagattgaattttggtcagactggagacgcagactccgtacctgacccccagcctctcggacagccaccagcagcccccacaagtttgggatctactacaatggctacaggcagtggcgcaccaatggcagacaataacgagggtgccgatggagtgggtaattcctcaggaaattggcattgcgattcccaatggctgggcgacagagtcatcaccaccagcacccgaacctgggccctgcccacctacaacaaccacctctacaagcaaatctccagccaatcaggagcatcgaacgacaaccactactttggccacagcaccccttgggggtattttgacttcaacagattccactgtcacttctccccacgtgactggcaaagactcatcaacaacaactggggattccgacccaagagactcaacttcaagctctttaacattcaagtcaaagaggtcacgcagaatgacggtacgacgacgattgccaataaccttaccagcacggttcaggtgtttactgactcggagtaccagctcccgtacgtcctcggctcggcgcatcaaggatgcctcccgccgttcccagcagacgtcttcatggtcccacagtatggatacctcaccctgaacaacgggagtcaggcggtaggacgctcttccttttactgcctggagtactttccttctcagatgcttcgtaccggaaacaactttaccttcagctacacctttgaagacgcgcctttccacagtagctacgctcacagccagagtctggatcggctgatgaatcctcttatcgaccagtacctgtattatctaaacaaaacaaacaatcaaagtggaaccttcacgcagtctcggctactgtttagtcaagctggacccaccagcattctcttcaagtctaaaaactggctgcctggaccttgctacagacaacagcgtctgtcaaagacagcaaacgacaacaacaacagcaactttccctggactgcggctacaaagtatcatctaaatggccgggactcgttggttaatccaggaccagctatggccagccacaaagacgatgaagaaaagttttttccccagcatggaaccctgatatttggtaaacaaggaacaaagctaacagacgcggatttggacaatgtcatgattacagatgaagaagaaatccgcaccaccaatcccgtggctacggagcagtacgggactgtgtcaaataatttgcagaaactcaacatactggcaactactggaactgtcaacacacaaggagcgttacctggtatggtgtggcaggatcgagacgtgtacctgcagggacccatttgggccaagattcctcacaccgatggacactttcatccttctccactgatgggaggttttggactcaaacacccgcctcctcagatcatgatcaaaaacactcccgttccagccaatcctcctacaaacttcagttctgccaagtttgcttccttcatcacacagtattccacgggacaagtcagcgtggagattgagtgggagctgcagaaggagaacagcaaacgctggaaccccgagatccagtacacttccaactacaacaaatctgttaatgtggactttactgtggacactaatggcgtgtattcagagcctcgccccattggcaccagatacctgactcgtaatctgtaa

SEQ ID NO: 4501 - DNA, 2208 bp, synthetic construct
  misc_feature 1..2208: note = source = /note="Description of Artificial Sequence: Synthetic polynucleotide"
  source 1..2208: mol_type = other DNA
atggctgccgatggttatcttccagattggctcgaggacactctctctgaaggaataagacagtggtggaagctcaaacctggcccaccaccgccaaagcccgcagagcggcacaaggacgccagtaggggtcttgtgcttcctgggtacaagtacctcggacccttcaacggactcgacaaaggagagccggtcaacgaggcagacgccgcggccctcgagcacgacaaggcctacgaccggcagctcgacagcggagacaacccgtacctcaagtacaaccacgccgacgcggagtttcaggagcgtcttaaagaagatacgtcttttgggggcaacctcggacgagcagtattccaggcgaaaaagagggttcttgaacctctgggcctggttgaggagcctgttaagacggctccgggaaaaaagaggccggtagagcactctcctgtggagccagactcctcctcgggaaccggaaaagcgggccagcagcctgcaagaaaaagattgaattttggtcagactggagacgcagactccgtacctgacccccagcctctcggacagccaccagcagcccccacaagtttgggatctactacaatggctacaggcagtggcgcaccaatggcagacaataacgagggtgccgatggagtgggtaattcctcaggaaattggcattgcgattcccaatggctgggcgacagagtcatcaccaccagcacccgaacctgggccctgcccacctacaacaaccacctctacaagcaaatctccagccaatcaggagcatcgaacgacaaccactactttggctacagcaccccttgggggtattttgacttcaacagattccactgtcacttctccccacgtgactggcaaagactcatcaacaacaactggggattccgacccaagagactcaacttcaagctctttaacattcaagtcaaagaggtcacgcagaatgacggtacgacgacgattgccaataaccttaccagcacggttcaggtgtttactgactcggagtaccagctcccgtacgtcctcggctcggcgcatcaaggatgcctcccgccgttcccagcagacgtcttcatggtcccacagtatggatacctcaccctgaacaacgggagtcaggcggtaggacgctcttccttttactgcctggagtactttccttctcagatgcttcgtaccggaaacaactttaccttcagctacacctttgaagacgtgcctttccacagtagctacgctcacagccagagtctggatcggctgatgaatcctcttatcgaccagtacctgtattatctaaacaaaacaaacaatcaaagtggaaccttcacgcagtctcggctactgtttagtcaagctggacccaccagcattctcttcaagtctaaaaactggctgcctggaccttgctacagacaacagcgtctgtcaaagacagcaaacgacaacaacaacagcaactttccctggactgcggctacaaagtatcatctaaatggccgggactcgttggttaatccaggaccagctatggccagccacaaagacgatgaagaaaagttttttcccatgcatggaaccctgatatttggtaaacaaggaacaaagctaacagacgcggatttggacaatgtcatgattacagatgaagaagaaatccgcaccaccaatcccgtggctacggagcagtacgggactgtgtcaaataatttgcagaaactcaacatactggcaactactggaactgtcaacacacaaggagcgttacctggtatggtgtggcaggatcgagacgtgtacctgcagggacccatttgggccaagattcctcacaccgatggacactttcatccttctccactgatgggaggttttggactcaaacacccgcctcctcagatcatgatcaaaaacactcccgttccagccaatcctcctacaaacttcagttctgccaagtttgcttccttcatcacacagtattccacgggacaagtcagcgtggagattgagtgggagctgcagaaggagaacagcaaacgctggaaccccgagatccagtacacttccaactacaacaaatctgttaatgtggactttactgtggacactaatggcgtgtattcagagcctcgccccattggcaccagatacctgactcgtaatctgtaa

SEQ ID NO: 4502 - DNA, 2208 bp, synthetic construct
  misc_feature 1..2208: note = source = /note="Description of Artificial Sequence: Synthetic polynucleotide"
  source 1..2208: mol_type = other DNA
atggctgccgatggttatcttccagattggctcgaggacactctctctgaaggaataagacagtggtggaagctcaaacctggcccaccaccaccaaagcccgcagagcggcataaggacgacagcaggggtcttgtgcttcctgggtacaagtacctcggacccttcaacggactcgacaagggagagccggtcaacgaggcagacgccgcggccctcgagcacgacaaagcctacgaccggcagctcgacagcggagacaacccgtacctcaagtacaaccacgccgacgcggagtttcaggagcgccttaaagaagatacgtcttttgggggcaacctcggacgagcagtcttccaggcgaaaaagagggttcttgaacctctgggcctggttgaggaacctgttaagacggctccgggaaaaaagaggccggtagagcactctcctgtggagccagactcctcctcgggaaccggaaaggcgggccagcagcctgcaagaaaaagattgaattttggtcagactggagacgcagactcagtacctgacccccagcctctcggacagccaccagcagccccctctggtctgggaactaatacgatggctacaggcagtggcgcaccaatggcagacaataacgagggcgccgacggagtgggtaattcctcgggaaattggcattgcgattccacatggatgggcgacagagtcatcaccaccagcacccgaacctgggccctgcccacctacaacaaccacctctacaagcaaatctccagccaatcaggagcatcgaacgacaaccactactttggctacagcaccccttgggggtattttgacttcaacagattccactgtcacttctccccacgtgactggcaaagactcatcaacaacaactggggattccgacccaagagactcaacttcaagctctttaacattcaagtcaaagaggtcacgcagaatgacggtacgacgacgattgccaataaccttaccagcacggttcaggtgtttactgactcggagtaccagctcccgtacgtcctcggctcggcgcatcaaggatgcctcccgccgttcccagcagacgtcttcatggtcccacagtatggatacctcaccctgaacaacgggagtcaggcggtaggacgctcttccttttactgcctggagtactttccttctcagatgcttcgtaccggaaacaactttaccttcagctacacctttgaagacgtgcctttccacagtagctacgctcacagccagagtctggatcggctgatgaatcctcttatcgaccagtacctgtattatctaaacaaaacaaacaatcaaagtggaaccttcacgcagtctcggctactgtttagtcaagctggacccaccagcattctcttcaagtctaaaaactggctgcctggaccttgctacagacaacagcgtctgtcaaagacagcaaacgacaacaacaacagcaactttccctggactgcggctacaaagtatcatctaaatggccgggactcgttggttaatccaggaccagctatggccagccacaaagacgatgaagaaaagttttttccccagcatggaaccctgatatttggtaaacaaggaacaaagctaacagacgcggatttggacaatgtcatgattacagatgaagaagaaatccgcaccaccaatcccgtggctacggagcagtacgggactgtgtcaaataatttgcagaaactcaacatactggcaactactggaactgtcaacacacaaggagcgttacctggtatggtgtggcaggatcgagacgtgtacctgcagggacccatttgggccaagattcctcacaccgatggacactttcatccttctccactgatgggaggttttggactcaaacacccgcctcctcagatcatgatcaaaaacactcccgttccagccaatcctcctacaaacttcagttctgccaagtttgcttccttcatcacacagtattccacgggacaagtcagcgtggagattgagtgggagctgcagaaggagaacagcaaacgctggaaccccgagatccagtacacttccaactacaacaaatctgttaatgtggactttactgtggacactaatggcgtgtattcagagcctcgccccattggcaccagatacctgactcgtaatctgtaa

SEQ ID NO: 4503 - DNA, 2208 bp, synthetic construct
  misc_feature 1..2208: note = source = /note="Description of Artificial Sequence: Synthetic polynucleotide"
  source 1..2208: mol_type = other DNA
atggctgccgatggttatcttccagattggctcgaggacactctctctgaaggaataagacagtggtggaagctcaaacctggcccaccaccgccaaagcccgcagagcggcacaaggacgacagtaggggtcttgtgcttcctgggtacaagtacctcggacccttcaacggactcgacaaaggagagccggtcaacgaggcagacgccgcggccctcgagcacgacaaggcctacgaccggcagctcgacagcggagacaacccgtacctcaagtacaaccacgccgacgcggagtttcaggagcgtcttaaagaagatacgtcttttgggggcaacctcggacgagcagtattccaggcgaaaaagagggttcttgaacctctgggcctggttgaggagcctgttaagacggctccgggaaaaaagaggccggtagagcactctcctgtggagccagactcctcctcgggaaccggaaaagcgggccagcagcctgcaagaaaaagattgaattttggtcagactggagacgcagactccgtacctgacccccagcctctcggacagccaccagcagcccccacaagtttgggatctactacaatggctacaggcagtggcgcaccaatggcagacaataacgagggtgccgatggagtgggtaattcctcaggaaattggcattgcgattcccaatggctgggcgacagagtcatcaccaccagcacccgaacctgggccctgcccacctacaacaaccacctctacaagcaaatctccagccaatcaggagcatcgaacgacaaccactactttggccacagcaccccttgggggtattttgacttcaacagattccactgtcacttctccccacgtgactggcaaagactcatcaacaacaactggggattccgacccaagagactcaacttcaagctctttaacattcaagtcaaagaggtcacgcagaatgacggtacgacgacgattgccaataaccttaccagcacggttcaggtgtttactgactcggagtaccagctcccgtacgtcctcggctcggcgcatcaaggatgcctcccgccgttcccagcagacgtcttcatggtcccacagtatggatacctcaccctgaacaacgggagtcaggcggtaggacgctcttccttttactgcctggagtactttccttctcagatgcttcgtaccggaaacaactttaccttcagctacacctttgaagacgtgcctttccacagtagctacgctcacagccagagtctggatcggctgatgaatcctcttatcgaccagtacctgtattatctaaacaaaacaaacaatcaaagtggaaccttcacgcagtctcggctactgtttagtcaagctggacccaccagcattctcttcaagtctaaaaactggctgcctggaccttgctacagacaacagcgtctgtcaaagacagcaaacgacaacaacaacagcaactttccctggactgcggctacaaagtatcatctaaatggccgggactcgttggttaatccaggaccagctatggccagccacaaagacgatgaagaaaagttttttcccatgcatggaaccctgatatttggtaaacaaggaacaaagctaacagacgcggatttggacaatgtcatgattacagatgaagaagaaatccgcaccaccaatcccgtggctacggagcagtacgggactgtgtcaaataatttgcagaaactcaacatactggcaactactggaactgtcaacacacaaggagcgttacctggtatggtgtggcaggatcgagacgtgtacctgcagggacccatttgggccaagattcctcacaccgatggacactttcatccttctccactgatgggaggttttggactcaaacacccgcctcctcagatcatgatcaaaaacactcccgttccagccaatcctcctacaaacttcagttctgccaagtttgcttccttcatcacacagtattccacgggacaagtcagcgtggagattgagtgggagctgcagaaggagaacagcaaacgctggaaccccgagatccagtacacttccaactacaacaaatctgttaatgtggactttactgtggacactaatggcgtgtattcagagcctcgccccattggcaccagatacctgactcgtaatctgtaa

SEQ ID NO: 4504 - DNA, 2208 bp, synthetic construct
  misc_feature 1..2208: note = source = /note="Description of Artificial Sequence: Synthetic polynucleotide"
  source 1..2208: mol_type = other DNA
atggctgccgatggttatcttccagattggctcgaggacactctctctgaaggaataagacagtggtggaagctcaaacctggcccaccaccgccaaagcccgcagagcggcacaaggacgacagtaggggtcttgtgcttcctgggtacaagtacctcggacccttcaacggactcgacaaaggagagccggtcaacgaggcagacgccgcggccctcgagcacgacaaggcctacgaccggcagctcgacagcggagacaacccgtacctcaagtacaaccacgccgacgcggagtttcaggagcgtcttaaagaagatacgtcttttgggggcaacctcggacgagcagtattccaggcgaaaaagagggttcttgaacctctgggcctggttgaggagcctgttaagacggctccgggaaaaaagaggccggtagagcactctcctgtggagccagactcctcctcgggaaccggaaaagcgggccagcagcctgcaagaaaaagattgaattttggtcagactggagacgcagactccgtacctgacccccagcctctcggacagccaccagcagcccccacaagtttgggatctactacaatggctacaggcagtggcgcaccaatggcagacaataacgagggtgccgatggagtgggtaattcctcaggaaattggcattgcgattcccaatggctgggcgacagagtcatcaccaccagcacccgaacctgggccctgcccacctacaacaaccacctctacaagcaaatctccagccaatcaggagcatcgaacgacaaccactactttggctacagcaccccttgggggtattttgacttcaacagattccactgtcacttctccccacgtgactggcaaagactcatcaacaacaactggggattccgacccaagagactcaacttcaagctctttaacattcaagtcaaagaggtcacgcagaatgacggtacgacgacgattgccaataaccttaccagcacggttcaggtgtttactgactcggagtaccagctcccgtacgtcctcggctcggcgcatcaaggatgcctcccgccgttcccagcagacgtcttcatggtcccacagtatggatacctcaccctgaacaacgggagtcaggcggtaggacgctcttccttttactgcctggagtactttccttctcagatgcttcgtaccggaaacaactttaccttcagctacacctttgaagacgtgcctttccacagtagctacgctcacagccagagtctggatcggctgatgaatcctcttatcgaccagtacctgtattatctaaacaaaacaaacaatcaaagtggaaccttcacgcagtctcggctactgtttagtcaagctggacccaccagcattctcttcaagtctaaaaactggctgcctggaccttgctacagacaacagcgtctgtcaaagacagcaaacgacaacaacaacagcaactttccctggactgcggctacaaagtatcatctaaatggccgggactcgttggttaatccaggaccagctatggccagccacaaagacgatgaagaaaagttttttccccagcatggaaccctgatatttggtaaacaaggaacaaagctaacagacgcggatttggacaatgtcatgattacagatgaagaagaaatccgcaccaccaatcccgtggctacggagcagtacgggactgtgtcaaataatttgcagaaactcaacatactggcaactactggaactgtcaacacacaaggagcgttacctggtatggtgtggcaggatcgagacgtgtacctgcagggacccatttgggccaagattcctcacaccgatggacactttcatccttctccactgatgggaggttttggactcaaacacccgcctcctcagatcatgatcaaaaacactcccgttccagccaatcctcctacaaacttcagttctgccaagtttgcttccttcatcacacagtattccacgggacaagtcagcgtggagattgagtgggagctgcagaaggagaacagcaaacgctggaaccccgagatccagtacacttccaactacaacaaatctgttaatgtggactttactgtggacactaatggcgtgtattcagagcctcgccccattggcaccagatacctgactcgtaatctgtaa

SEQ ID NO: 4505 - DNA, 2208 bp, synthetic construct
  misc_feature 1..2208: note = source = /note="Description of Artificial Sequence: Synthetic polynucleotide"
  source 1..2208: mol_type = other DNA
atggctgccgatggttatcttccagattggctcgaggacactctctctgaaggaataagacagtggtggaagctcaaacctggcccaccaccgccaaagcccgcagagcggcacaaggacgccagtaggggtcttgtgcttcctgggtacaagtacctcggacccttcaacggactcgacaaaggagagccggtcaacgaggcagacgccgcggccctcgagcacgacaaggcctacgaccggcagctcgacagcggagacaacccgtacctcaagtacaaccacgccgacgcggagtttcaggagcgtcttaaagaagatacgccttttgggggcaacctcggacgagcagtattccaggcgaaaaagagggttcttgaacctctgggcctggttgaggagcctgttaagacggctccgggaaaaaagaggccggtagagcactctcctgtggagccagactcctcctcgggaaccggaaaagcgggccagcggcctgcaagaaaaagattgaattttggtcagactggagacgcagactccgtacctgacccccagcctctcggacagccaccagcagcccccacaagtttgggatctactacaatggctacaggcagtggcgcaccaatggcagacaataacgagggtgccgatggagtgggtaattcctcaggaaattggcattgcgattcccaatggctgggcgacagagtcatcaccaccagcacccgaacctgggccctgcccacctacaacaaccacctctacaagcaaatccccagccaatcaggagcatcgaacgacaaccactactttggctacagcaccccttgggggtattttgacttcaacagattccactgtcacttctccccacgtgactggcaaagactcatcaacaacaactggggattccgacccaagagactcaacttcaagctctttaacattcaagtcaaagaggtcacgcagaatgacggtacgacgacgattgccaataaccttaccagcacggttcaggtgtttactgactcggagtaccagctcccgtacgtcctcggctcggcgcatcaaggatgcctcccgccgttcccagcagacgtcttcatggtcccacagtatggatacctcaccctgaacaacgggagtcaggcggtaggacgctcttccttttactgcctggagtactttccttctcagatgcttcgtaccggaaacaactttaccttcagctacacctttgaagacgtgcctttccacagtagctacgctcacagccagagtctggatcggctgatgaatcctcttatcgaccagtacctgtattatctaaacaaaacaaacaatcaaagtggaaccttcacgcagtctcggctactgtttagtcaagctggacccaccagcattctcttcaagtctaaaaactggctgcctggaccttgctacagacaacagcgtctgtcaaagacagcaaacgacaacaacaacagcaactttccctggactgcggctacaaagtatcatctaaatggccgggactcgttggttaatccaggaccagctatggccagccacaaagacgatgaagaaaagttttttccccaacatggaaccctgatatttggtaaacaaggaacaaagctaacagacgcggatttggacaatgtcatgattacagatgaagaagaaatccgcaccaccaatcccgtggctacggagcagtacgggactgtgtcaaataatttgcagaaactcaacatactggcaactactggaactgtcaacacacaaggagcgttacctggtatggtgtggcaggatcgagacgtgtacctgcagggacccatttgggccaagattcctcacaccgatggacactttcatccttctccactgatgggaggttttggactcaaacacccgcctcctcagatcatgatcaaaaacactcccgttccagccaatcctcctacaaacttcagttctgccaagtttgcttccttcatcacacagtattccacgggacaagtcagcgtggagattgagtgggagctgcagaaggagaacagcaaacgctggaaccccgagatccagtacacttccaactacaacaaatctgttaatgtggactttactgtggacactaatggcgtgtattcagagcctcgccccattggcaccagatacctgactcgtaatctgtaa

SEQ ID NO: 4506 - DNA, 2208 bp, synthetic construct
  misc_feature 1..2208: note = source = /note="Description of Artificial Sequence: Synthetic polynucleotide"
  source 1..2208: mol_type = other DNA
atggctgccgatggttatcttccagattggctcgaggacactctctctgaaggaataagacagtggtggaagctcaaacctggcccaccaccaccaaagcccgcagagcggcataaggacgacagcaggggtcttgtgcttcctgggtacaagtacctcggacccttcaacggactcgacaagggagagccggtcaacgaggcagacgccgcggccctcgagcacgacaaagcctacgaccggcagctcgacagcggagacaacccgtacctcaagtacaaccacgccgacgcggagtttcaggagcgccttaaagaagatacgtcttttgggggcaacctcggacgagcagtcttccaggcgaaaaagagggttcttgaacctctgggcctggttgaggaacctgttaagacggctccgggaaaaaagaggccggtagagcactctcctgtggagccagactcctcctcgggaaccggaaaggcgggccagcagcctgcaagaaaaagattgaattttggtcagactggagacgcagactcagtacctgacccccagcctctcggacagccaccagcagccccctctggtctgggaactaatacgatggctacaggcagtggcgcaccaatggcagacaataacgagggcgccgacggagtgggtaattcctcgggaaattggcattgcgattccacatggatgggcgacagagtcatcaccaccagcacccgaacctgggccctgcccacctacaacaaccacctctacaaacaaatttccagccaatcaggagcctcgaacgacaatcactactttggctacagcaccccttgggggtattttgacttcaacagattccactgccacttttcaccacgtgactggcaaagactcatcaacaacaactggggattccgacccaagagactcaacttcaagctctttaacattcaagtcaaagaggtcacgcagaatgacggtacgacgacgattgccaataaccttaccagcacggttcaggtgtttactgactcggagtaccagctcccgtacgtcctcggctcggcgcatcaaggatgcctcccgccgttcccagcagacgtcttcatggtcccacagtatggatacctcaccctgaacaacgggagtcaggcggtaggacgctcttccttttactgcctggagtactttccttctcagatgcttcgtaccggaaacaactttaccttcagctacacctttgaagacgcgcctttccacagtagctacgctcacagccagagtctggatcggctgatgaatcctcttatcgaccagtacctgtattatctaaacaaaacaaacaatcaaagtggaaccttcacgcagtctcggctactgtttagtcaagctggacccaccagcattctcttcaagtctaaaaactggctgcctggaccttgctacagacaacagcgtctgtcaaagacagcaaacgacaacaacaacagcaactttccctggactgcggctacaaagtatcatctaaatggccgggactcgttggttaatccaggaccagctatggccagccacaaagacgatgaagaaaagttttttccccagcatggaaccctgatatttggtaaacaaggaacaaagctaacagacgcggatttggacaatgtcatgattacagatgaagaagaaatccgcaccaccaatcccgtggctacggagcagtacgggactgtgtcaaataatttgcagaaactcaacatactggcaactactggaactgtcaacacacaaggagcgttacctggtatggtgtggcaggatcgagacgtgtacctgcagggacccatttgggccaagattcctcacaccgatggacactttcatccttctccactgatgggaggttttggactcaaacacccgcctcctcagatcatgatcaaaaacactcccgttccagccaatcctcctacaaacttcagttctgccaagtttgcttccttcatcacacagtattccacgggacaagtcagcgtggagattgagtgggagctgcagaaggagaacagcaaacgctggaaccccgagatccagtacacttccaactacaacaaatctgttaatgtggactttactgtggacactaatggcgtgtattcagagcctcgccccattggcaccagatacctgactcgtaatctgtaa

SEQ ID NO: 4507 - DNA, 2208 bp, synthetic construct
  misc_feature 1..2208: note = source = /note="Description of Artificial Sequence: Synthetic polynucleotide"
  source 1..2208: mol_type = other DNA
atggctgccgatggttatcttccagattggctcgaggacattctctctgaaggaataagacagtggtggaagctcaaacctggcccaccaccgccaaagcccgcagagcggcacaaggacgccagtaggggtcttgtgcttcctgggtacaagtacctcggacccttcaacggactcgacaaaggagagccggtcaacgaggcagacgccgcggccctcgagcacgacaaggcctacgaccggcagctcgacagcggagacaacccgtacctcaagtacaaccacgccgacgcggagtttcaggagcgtcttaaagaagatacgtcttttgggggcaacctcggacgagcagtattccaggcgaaaaagagggttcttgaacctctgggcctggttgaggagcctgttaagacggctccgggaaaaaagaggccggtagagcactctcctgtggagccagactcctcctcgggaaccggaaaagcgggccagcagcctgcaagaaaaagattgaattttggtcagactggagacgcagactccgtacctgacccccagcctctcggacagccaccagcagcccccacaagtttgggatctactacaatggctacaggcagtggcgcaccaatggcagacaataacgagggtgccgatggagtgggtaattcctcaggaaattggcattgcgattcccaatggctgggcgacagagtcatcaccaccagcacccgaacctgggccctgcccacctacaacaaccacctctacaagcaaatctccagccaatcaggagcatcgaacgacaaccactactttggctacagcaccccttgggggtattttgacttcaacagattccactgtcacttctccccacgtgactggcaaagactcatcaacaacaactggggattccgacccaagagactcaacttcaagctctttaacattcaagtcaaagaggtcacgcagaatgacggtacgacgacgattgccaataaccttaccagcacggttcaggtgtttactgactcggagtaccagctcccgtacgtcctcggctcggcgcatcaaggatgcctcccgccgttcccagcagacgtcttcatggtcccacagtatggatacctcaccctgaacaacgggagtcaggcggtaggacgctcttccttttactgcctggagtactttccttctcagatgcttcgtaccggaaacaactttaccttcagctacacctttgaagacgtgcctttccacagtagctacgctcacagccagagtctggatcggctgatgaatcctcttatcgaccagtacctgtattatctaaacaaaacaaacaatcaaagtggaaccttcacgcagtctcggctactgtttagtcaagctggacccaccagcattctcttcaagtctaaaaactggctgcctggaccttgctacagacaacagcgtctgtcaaagacagcaaacgacaacaacaacagcaactttccctggactgcggctacaaagtatcatctaaatggccgggactcgttggttaatccaggaccagctatggccagccacaaagacgatgaagaaaagttttttccccagcatggaaccctgatatttggtaaacaaggaacaaagctaacagacgcggatttggacaatgtcatgattacagatgaagaagaaatccgcaccaccaatcccgtggctacggagcagtacgggactgtgtcaaataatttgcagaaactcaacatactggcaactactggaactgtcaacacacaaggagcgttacctggtatggtgtggcaggatcgagacgtgtacctgcagggacccatttgggccaagattcctcacaccgatggacactttcatccttctccactgatgggaggttttggactcaaacacccgcctcctcagatcatgatcaaaaacactcccgttccagccaatcctcctacaaacttcagttctgccaagtttgcttccttcatcacacagtattccacgggacaagtcagcgtggagattgagtgggagctgcagaaggagaacagcaaacgctggaaccccgagatccagtacacttccaactacaacaaatctgttaatgtggactttactgtggacactaatggcgtgtattcagagcctcgccccattggcaccagatacctgactcgtaatctgtaa

SEQ ID NO: 4508 - DNA, 2208 bp, synthetic construct
  misc_feature 1..2208: note = source = /note="Description of Artificial Sequence: Synthetic polynucleotide"
  source 1..2208: mol_type = other DNA
atggctgccgatggttatcttccagattggctcgaggacattctctctgaaggaataagacagtggtggaagctcaaacctggcccaccaccgccaaagcccgcagagcggcacaaggacgccagtaggggtcttgtgcttcctgggtacaagtacctcggacccttcaacggactcgacaaaggagagccggtcaacgaggcagacgccgcggccctcgagcacgacaaggcctacgaccggcagctcgacagcggagacaacccgtacctcaagtacaaccacgccgacgcggagtttcaggagcgtcttaaagaagatacgtcttttgggggcaacctcggacgagcagtattccaggcgaaaaagagggttcttgaacctctgggcctggttgaggagcctgttaagacggctccgggaaaaaagaggccggtagagcactctcctgtggagccagactcctcctcgggaaccggaaaagcgggccagcagcctgcaagaaaaagattgaattttggtcagactggagacgcagactccgtacctgacccccagcctctcggacagccaccagcagcccccacaagtttgggatctactacaatggctacaggcagtggcgcaccaatggcagacaataacgagggtgccgatggagtgggtaattcctcaggaaattggcattgcgattcccaatggctgggcgacagagtcatcgccaccagcacccgaacctgggccctgcccacctacaacaaccacctctacaagcaaatctccagccaatcaggagcatcgaacgacaaccactactttggctacagcaccccttgggggtattttgacttcaacagattccactgtcacttctccccacgtgactggcaaagactcatcaacaacaactggggattccgacccaagagactcaacttcaagctctttaacattcaagtcaaagaggtcacgcagaatgacggtacgacgacgattgccaataaccttaccagcacggttcaggtgtttactgactcggagtaccagctcccgtacgtcctcggctcggcgcatcaaggatgcctcccgccgttcccagcagacgtcttcatggtcccacagtatggatacctcaccctgaacaacgggagtcaggcggtaggacgctcttccttttactgcctggagtactttccttctcagatgcttcgtaccggaaacaactttaccttcagctacacctttgaagacgtgcctttccacagtagctacgctcacagccagagtctggatcggctgatgaatcctcttatcgaccagtacctgtattatctaaacaaaacaaacaatcaaagtggaaccttcacgcagtctcggctactgcttagtcaagctggacccaccagcattctcttcaagtctaaaaactggctgcctggaccttgctacagacaacagcgtctgtcaaagacagcaaacgacaacaacaacagcaactttccctggactgcggctacaaagtatcatctaaatggccgggactcgttggttaatccaggaccagctatggccagccacaaagacgatgaagaaaagttttttccccaacatggaaccctgatatttggtaaacaaggaacaaagctaacagacgcggatttggacaatgtcatgattacagatgaagaagaaatccgcaccaccaatcccgtggctacggagcagtacgggactgtgtcaaataatttgcagaaactcaacatactggcaactactggaactgtcaacacacaaggagcgttacctggtatggtgtggcaggatcgagacgtgtacctgcagggacccatttgggccaagattcctcacaccgatggacactttcatccttctccactgatgggaggttttggactcaaacacccgcctcctcagatcatgatcaaaaacactcccgttccagccaatcctcctacaaacttcagttctgccaagtttgcttccttcatcacacagtattccacgggacaagtcagcgtggagattgagtgggagctgcagaaggagaacagcaaacgctggaaccccgagatccagtacacttccaactacaacaaatctgttaatgtggactttactgtggacactaatggcgtgtattcagagcctcgccccattggcaccagatacctgactcgtaatctgtaa

SEQ ID NO: 4509 - DNA, 2208 bp, synthetic construct
  misc_feature 1..2208: note = source = /note="Description of Artificial Sequence: Synthetic polynucleotide"
  source 1..2208: mol_type = other DNA
atggctgccgatggttatcttccagattggctcgaggacactctctctgaaggaataagacagtggtggaagctcaaacctggcccaccaccgccaaagcccgcagagcggcacaaggacgccagtaggggtcttgtgcttcctgggtacaagtacctcggacccttcaacggactcgacaaaggagagccggtcaacgaggcagacgccgcggccctcgagcacgacaaggcctacgaccggcagctcgacagcggagacaacccgtacctcaagtacaaccacgccgacgcggagtttcaggagcgtcttaaagaagatacgccttttgggggcaacctcggacgagcagtattccaggcgaaaaagagggttcttgaacctctgggcctggttgaggagcctgttaagacggctccgggaaaaaagaggccggtagagcactctcctgtggagccagactcctcctcgggaaccggaaaagcgggccagcagcctgcaagaaaaagattgaattttggtcagactggagacgcagactccgtacctgacccccagcctctcggacagccaccagcagcccccacaagtttgggatctactacaatggctacaggcagtggcgcaccaatggcagacaataacgagggtgccgatggagtgggtaattcctcaggaaattggcattgcgattcccaatggctgggcgacagagtcatcaccaccagcacccgaacctgggccctgcccacctacaacaaccacctctacaagcaaatccccagccaatcaggagcatcgaacgacaaccactactttggctacagcaccccttgggggtattttgacttcaacagattccactgtcacttctccccacgtgactggcaaagactcatcaacaacaactggggattccgacccaagagactcaacttcaagctctttaacattcaagtcaaagaggtcacgcagaatgacggtacgacgacgattgccaataaccttaccagcacggttcaggtgtttactgactcggagtaccagctcccgtacgtcctcggctcggcgcatcaaggatgcctcccgccgttcccagcagacgtcttcatggtcccacagtatggatacctcaccctgaacaacgggagtcaggcggtaggacgctcttccttttactgcctggagtactttccttctcagatgcttcgtaccggaaacaactttaccttcagctacacctttgaagacgtgcctttccacagtagctacgctcacagccagagtctggatcggctgatgaatcctcttatcgaccagtacctgtattatctaaacaaaacaaacaatcaaagtggaaccttcacgcagtctcggctactgtttagtcaagctggacccaccagcattctcttcaagtctaaaaactggctgcctggaccttgctacagacaacagcgtctgtcaaagacagcaaacgacaacaacaacagcaactttccctggactgcggctacaaagtatcatctaaatggccgggactcgttggttaatccaggaccagctatggccagccacaaagacgatgaagaaaagttttttccccaacatggaaccctgatatttggtaaacaaggaacaaagctaacagacgcggatttggacaatgtcatgattacagatgaagaagaaatccgcaccaccaatcccgtggctacggagcagtacgggactgtgtcaaataatttgcagaaactcaacatactggcaactactggaactgtcaacacacaaggagcgttacctggtatggtgtggcaggatcgagacgtgtacctgcagggacccatttgggccaagattcctcacaccgatggacactttcatccttctccactgatgggaggttttggactcaaacacccgcctcctcagatcatgatcaaaaacactcccgttccagccaatcctcctacaaacttcagttctgccaagtttgcttccttcatcacacagtattccacgggacaagtcagcgtggagattgagtgggagctgcagaaggagaacagcaaacgctggaaccccgagatccagtacacttccaactacaacaaatctgttaatgtggactttactgtggacactaatggcgtgtattcagagcctcgccccattggcaccagatacctgactcgtaatctgtaa

SEQ ID NO: 4510 - DNA, 2208 bp, synthetic construct
  misc_feature 1..2208: note = source = /note="Description of Artificial Sequence: Synthetic polynucleotide"
  source 1..2208: mol_type = other DNA
atggctgccgatggttatcttccagattggctcgaggacactctctctgaaggaataagacagtggtggaagctcaaacctggcccaccaccaccaaagcccgcagagcggcataaggacgacagcaggggtcttgtgcttcctgggtacaagtacctcggacccttcaacggactcgacaagggagagccggtcaacgaggcagacgccgcggccctcgagcacgacaaagcctacgaccggcagctcgacagcggagacaacccgtacctcaagtacaaccacgccgacgcggagtttcaggagcgccttaaagaagatacgtcttttgggggcaacctcggacgagcagtcttccaggcgaaaaagagggttcttgaacctctgggcctggttgaggaacctgttaagacggctccgggaaaaaagaggccggtagagcactctcctgtggagccagactcctcctcgggaaccggaaaggcgggccagcagcctgcaagaaaaagattgaawtttggtcagactggagacgcagactcagtacctgacccccagcctctcggacagccaccagcagccccctctggtctsggaactaatacgatggctacaggcagtggcgcaccaatggcagacaataacgagggcgccgacgkagtgggtaattcctcgggaaattggcattgcgattccacatggatgggcgacagagtcatcaccaccagcacccgaacctgggccctgcccacctacaacaaccacctctacaaacaaatttccagccaatcaggagcctcgaacgacaatcactactttggctacagcaccccttgggggtattttgacttcaacagattccactgccacttttcaccacgtgactggcaaagactcatcaacaacaactggggattccgacccaagagactcaacttcaagctctttaacattcaagtcaaagaggtcacgcagaatgacggtacgacgacgattgccaataaccttaccagcacggttcaggtgtttactgactcggagtaccagctcccgtacgtcctcggctcggcgcatcaaggatgcctcccgccgttcccagyagacgtcttcatggtgccacagtatggatacctcaccctgaacaacgggagtcaggcagtaggacgctcttcattttactgcctggagtactttccttctcagatgctgcgtaccggaaacaactttaccttcagctacacttttgaggacgttcctttccacagcagctacgctcacagccagagtctggaycgkctsatgaatcctctyatcgaccagtacctgtattatctaaacaaaacaaacaatcaaagtggaaccttcacgcagtctcggctactgtttagtcaagctggacccaccagcattctcttcaagtctaaaaactggctgcctggaccttgctacagacaacagcgtctgtcaaagacagcaaacgacaacaacaacagcaamtttccctggactgcggctacaaagtatcatctaaatggccgggactcgttggttaatccaggaccagctatggccagccacaaagacgatgaagaaaagttttttcccatgcatggaaccytgatatttggtaaacaaggaacaaagctaacagacgcggatttggacaatgtcrtgattacagatgaagaagaaatccgcaccaccaatcccgtggctacggagcagtacgggactgtgtcaaataatttgcagaaactcaacatactgscaactactggaactgtcaacwcacaaggagcgttacctggtatggtgtggcaggatcgagacgtgtacctgcagggacccatttgggccaagattcctcacaccgatggacactttcacccttctccactgatgggaggttttggactcaaacacccgcctcctcagatcatgatcaaaaacactccsgttccagcsaatcctcctacaaacttcagttatgcaaagtttgcttccttcatcacacagtattccacgggacaagtcagcgtggagatggagtgggagctgcagaaggagaacagcaaacgctggaaccccgagattccatacacttccaaatacaacaaatctgttaatgtggactttactgtggacactaatggcgtgtattcagagcctcgccccattggcacccgatacctgactcgtaatctgtaa

SEQ ID NO: 4511 - DNA, 2208 bp, synthetic construct
  misc_feature 1..2208: note = source = /note="Description of Artificial Sequence: Synthetic polynucleotide"
  source 1..2208: mol_type = other DNA
atggctgccgatggttatcttccagattggctcgaggacactctctctgaaggaataagacagtggtggaagctcaaacctggcccaccaccaccaaagcccgcagagcggcatcaggacgacagcaggggtcttgtgcttcctgggtacaagtacctcggacccttcaacggactcgacaaaggagagccggtcaacgaggcagacgctgcggccctcgagcacgacaaggcctacgaccggcagctcgacagcggagacaacccgtacctcaagtacaaccacgccgacgcggagtttcaggagcgtcttaaagaagatacgtcttttgggggcaacctcggacgagcagtcttccaggcgaaaaagagggttcttgaacctctgggcctggttgaggaacctgttaagacggctccgggaaaaaagaggccggtagagcactctcctgcggagccagactcctcctcgggaaccggaaaagcgggccagcagcctgcaagaaagagattgaatttcggtcagactggagacgcagactccgtacctgacccccagcctctcggacagccaccagcagcccccacaagtttgggatctactacaatggctacaggcagtggcgcaccaatggcagacaataacgagggtgccgatggagtgggtaattcctcaggaaattggcattgcgattcccaatggctgggcgacagagtcatcaccaccagcacccgaacctgggccctgcccacctacaacaaccacctctacaagcaaatctccagccaatcaggagcatcgaacgacaaccactactttggctacagcaccccttgggggtattttgacttcaacagattccactgtcacttctccccacgtgactggcaaagactcatcaacaacaactggggattccgacccaagagactcaacttcaagctctttaacattcaagtcaaagaggtcacgcagaatgacggtacgacgacgattgccaataaccttaccagcacggttcaggtgtttactgactcggagtaccagctcccgtacgtcctcggctcggcgcatcaaggatgcctcccgccgtttccagcggacgtcttcatggtcccacagtatggatacctcaccctgaacaacgggagtcaggcggtaggacgctcttccttttactgcctggagtactttccttctcagatgctgcgtaccggaaacaactttaccttcagctacacctttgaggacgtgcctttccacagcagctacgctcacagccagagtttggaccggctgatgaatcctctgatcgaccagtatctgtattatctgaacaggacacaatcaaatagtggaactcttcagcagtctaggctactgtttagccaagctggacccaccagcatgtctcttcaagctaaaaactggctgcctggaccttgctacagacagcagcgtctgtcaaagcaggcaaacgacaacaacaacagcaactttccctggactgcggctacaaagtatcatctaaatggtcgggactcgttggttaatccaggaccagctatggccagccacaaagacgatgaagaaaagtttttccccatgcatggaaccctgatatttggtaaacaaggaacaaatgctaacgacgcggatttggaacatgtcatgattacagatgaagaagaaatcaggaccaccaatcccgtggctacagagcagtacggaaacgtgtcaaataatttgcaaaactcaaatactggtccaactacagaaaatgtcaatcaccagggagcgttacctggtatggtgtggcaggatcgagacgtgtacctgcagggacccatttgggccaagattcctcacaccgacggacactttcacccttctccactgatgggaggttttggactcaaacacccgcctcctcaaatcatgatcaaaaacactcctgttccagccaatcctcctacaaacttcagcgcggcaaagtttgcttccttcatcacacagtattccacgggacaggccagcgtggagatcgagtgggagctgcagaaggagaacagcaaacgctggaaccccgagatccagtacacttccaactacaacaaatctgttaatgtggactttactgtggacactaatggtgtgtattcagagcctcgccccattggcaccagatacctgactcgtaatctgtaa

SEQ ID NO: 4512 - DNA, 2208 bp, synthetic construct
  misc_feature 1..2208: note = source = /note="Description of Artificial Sequence: Synthetic polynucleotide"
  source 1..2208: mol_type = other DNA
atggctgccgatggttatcttccagattggctcgaggacactctctctgaaggaataagacagtggtggaagctcaaacctggcccaccaccgccaaagcccgcagagcggcacaaggacgacagtaggggtcttgtgcttcctgggtacaagtacctcggacccttcaacggactcgacaaaggagagccggtcaacgaggcagacgccgcggccctcgagcacgacaaggcctacgaccggcagctcgacagcggagacaacccgtacctcaagtacaaccacgccgacgcggagtttcaggagcgtcttaaagaagatacgtcttttgggggcaacctcggacgagcagtattccaggcgaaaaagagggttcttgaacctctgggcctggttgaggagcctgttaagacggctccgggaaaaaagaggccggtagagcactctcctgtggagccagactcctcctcgggaaccggaaaagcgggccagcagcctgcaagaaaaagattgaattttggtcagactggagacgcagactccgtacctgacccccagcctctcggacagccaccagcagcccccacaagtttgggatctactacaatggctacaggcagtggcgcaccaatggcagacaataacgagggtgccgatggagtgggtaattcctcaggaaattggcattgcgattcccaatggctgggcgacagagtcatcaccaccagcacccgaacctgggccctgcccacctacaacaaccacctctacaagcaaatctccagccaatcaggagcatcgaacgacaaccactactttggccacagcaccccttgggggtattttgacttcaacagattccactgtcacttctccccacgtgactggcaaagactcatcaacaacaactggggattccgacccaagagactcaacttcaagctctttaacattcaagtcaaagaggtcacgcagaatgacggtacgacgacgattgccaataaccttaccagcacggttcaggtgtttactgactcggagtaccagctcccgtacgtcctcggctcggcgcatcaaggatgcctcccgccgttcccagcagacgtcttcatggtcccacagtatggatacctcaccctgaacaacgggagtcaggcggtaggacgctcttccttttactgcctggagtactttccttctcagatgcttcgtaccggaaacaactttaccttcagctacacctttgaagacgtgcctttccacagtagctacgctcacagccagagtctggatcggctgatgaatcctcttatcgaccagtacctgtattatctaaacaaaacacaatcaaatagtggaactcttcagcagtctcggctactgtttagtcaagctggacccaccagcatgcctcttcaagctaaaaactggctgcctggaccttgctacagacaacagcgtctgtcaaagcaggcaaacgacaacaacaacagcaactttccctggactgcggctacaaagtatcatctaaatggccgggactcgttggttaatccaggaccagctatggccagccacaaagacgatgaagaaaagtttttccccatgcatggaaccctgatatttggtaaacaaggaacaaatgctaacgacgcggatttggacaatgtcatgattacagatgaagaagaaatccgcaccaccaatcccgtggctacggagcagtacgggactgtgtcaaataatttgcaaaactcaaatactggtccaactactggaactgtcaatcaccaaggagcgttacctggtatggtgtggcaggatcgagacgtgtacctgcagggacccatttgggccaagattcctcacaccgatggacactttcatccttctccactgatgggaggttttggactcaaacacccgcctcctcagatcatgatcaaaaacactcccgttccagccaatcctcctacaaacttcagttctgccaagtttgcttccttcatcacacagtattccacgggacaagtcagcgtggagattgagtgggagctgcagaaggagaacagcaaacgctggaaccccgagatccagtacacttccaactacaacaaatctgttaatgtggactttactgtggacactaatggcgtgtattcagagcctcgccccattggcaccagatacctgactcgtaatctgtaa

SEQ ID NO: 4513 - DNA, 2208 bp, synthetic construct
  misc_feature 1..2208: note = source = /note="Description of Artificial Sequence: Synthetic polynucleotide"
  source 1..2208: mol_type = other DNA
atggctgccgatggttatcttccagattggctcgaggacactctctctgaaggaataagacagtggtggaagctcaaacctggcccaccaccgccaaagcccgcagagcggcacaaggacgacagtaggggtcttgtgcttcctgggtacaagtacctcggacccttcaacggactcgacaaaggagagccggtcaacgaggcagacgccgcggccctcgagcacgacaaggcctacgaccggcagctcgacagcggagacaacccgtacctcaagtacaaccacgccgacgcggagtttcaggagcgtcttaaagaagatacgtcttttgggggcaacctcggacgagcagtattccaggcgaaaaagagggttcttgaacctctgggcctggttgaggagcctgttaagacggctccgggaaaaaagaggccggtagagcactctcctgtggagccagactcctcctcgggaaccggaaaagcgggccagcagcctgcaagaaaaagattgaattttggtcagactggagacgcagactccgtacctgacccccagcctctcggacagccaccagcagcccccacaagtttgggatctactacaatggctacaggcagtggcgcaccaatggcagacaataacgagggtgccgatggagtgggtaattcctcaggaaattggcattgcgattcccaatggctgggcgacagagtcatcaccaccagcacccgaacctgggccctgcccacctacaacaaccacctctacaagcaaatctccagccaatcaggagcatcgaacgacaaccactactttggccacagcaccccttgggggtattttgacttcaacagattccactgtcacttctccccacgtgactggcaaagactcatcaacaacaactggggattccgacccaagagactcaacttcaagctctttaacattcaagtcaaagaggtcacgcagaatgacggtacgacgacgattgccaataaccttaccagcacggttcaggtgtttactgactcggagtaccagctcccgtacgtcctcggctcggcgcatcaaggatgcctcccgccgttcccagcagacgtcttcatggtcccacagtatggatacctcaccctgaacaacgggagtcaggcggtaggacgctcttccttttactgcctggagtactttccttctcagatgcttcgtaccggaaacaactttaccttcagctacacctttgaagacgtgcctttccacagtagctacgctcacagccagagtctggatcggctgatgaatcctcttatcgaccagtacctgtattatctaaacaaaacacaatcaaatagtggaactcttcagcagtctcggctactgtttagtcaagctggacccaccagcatgtctcttcaagctaaaaactggctgcctggaccttgctacagacaacagcgtctgtcaaagcaggcaaacgacaacaacaacagcaactttccctggactgcggctacaaagtatcatctaaatggccgggactcgttggttaatccaggaccagctatggccagccacaaagacgatgaagaaaagtttttccccatgcatggaaccctgatatttggtaaacaaggaacaaatgctaacgacgcggatttggacaatgtcatgattacagatgaagaagaaatccgcaccaccaatcccgtggctacggagcagtacgggactgtgtcaaataatttgcaaaactcaaatactggtccaactactggaactgccaatcaccaaggagcgttacctggtatggtgtggcaggatcgagacgtgtacctgcagggacccatttgggccaagattcctcacaccgatggacactttcatccttctccactgatgggaggttttggactcaaacacccgcctcctcagatcatgatcaaaaacactcccgttccagccaatcctcctacaaacttcagttctgccaagtttgcttccttcatcacacagtattccacgggacaagtcagcgtggagattgagtgggagctgcagaaggagaacagcaaacgctggaaccccgagatccagtacacttccaactacaacaaatctgttaatgtggactttactgtggacactaatggcgtgtattcagagcctcgccccattggcaccagatacctgactcgtaatctgtaa

SEQ ID NO: 4514 - DNA, 2208 bp, synthetic construct
  misc_feature 1..2208: note = source = /note="Description of Artificial Sequence: Synthetic polynucleotide"
  source 1..2208: mol_type = other DNA
atggctgccgatggttatcttccagattggctcgaggacactctctctgaaggaataagacagtggtggaagctcaaacctggcccaccaccgccaaagcccgcagagcggcacaaggacgacagtaggggtcttgtgcttcctgggtacaagtacctcggacccttcaacggactcgacaaaggagagccggtcaacgaggcagacgccgcggccctcgagcacgacaaggcctacgaccggcagctcgacagcggagacaacccgtacctcaagtacaaccacgccgacgcggagtttcaggagcgtcttaaagaagatacgtcttttgggggcaacctcggacgagcagtattccaggcgaaaaagagggttcttgaacctctgggcctggttgaggagcctgttaagacggctccgggaaaaaagaggccggtagagcactctcctgtggagccagactcctcctcgggaaccggaaaagcgggccagcagcctgcaagaaaaagattgaattttggtcagactggagacgcaggctccgtacctgacccccagcctctcggacagccaccagcagcccccacaagtttgggatctactacaatggctacaggcagtggcgcaccaatggcagacaataacgagggtgccgatggagtgggtaattcctcaggaaattggcattgcgattcccaatggctgggcgacagagtcatcaccaccagcacccgaacctgggccctgcccacctacaacaaccacctctacaagcaaatctccagccaatcaggagcatcgaacgacaaccactactttggccacagcaccccttgggggtattttgacttcaacagattccactgtcacttctccccacgtgactggcaaagactcatcaacaacaactggggattccgacccaagagactcaacttcaagctctttaacattcaagtcaaagaggtcacgcagaatgacggtacgacgacgattgccaataaccttaccagcacggttcaggtgtttactgactcggagtaccagctcccgtacgtcctcggctcggcgcatcaaggatgcctcccgccgttcccagcagacgtcttcatggtcccacagtatggatacctcaccctgaacaacgggagtcaggcggtaggacgctcttccttttactgcctggagtactttccttctcagatgcttcgtaccggaaacaactttaccttcagctacacctttgaagacgtgcctttccacagtagctacgctcacagccagagtctggatcggctgatgaatcctcttatcgaccagtacctgtattatctaaacaaaacacaatcaaatagtggaactcttcagcagtctcggctactgtttagtcaagctggacccaccagcatgtctcttcaagctaaaaactggctgcctggaccttgctacagacaacagcgtctgtcaaagcaggcaaacgacaacaacaacagcaactttccctggactgcggctacaaagtatcatctaaatggccgggactcgttggttaatccaggaccagctatggccagccacaaagacgatgaagaaaagtttttccccatgcatggaaccctgatatttggtaaacaaggaacaaatgctaacgacgcggatttggacaatgtcatgattacagatgaagaagaaatccgcaccaccaatcccgtggctacggagcagtacgggactgtgtcaaataatttgcaaaactcaaatactggtccaactactggaactgtcaatcaccaaggagcgttacctggtatggtgtggcaggatcgagacgtgtacctgcagggacccatttgggccaagattcctcacaccgatggacactttcatccttctccactgatgggaggttttggactcaaacacccgcctcctcagatcatgatcaaaaacactcccgttccagccaatcctcctacaaacttcagttctgccaagtttgcttccttcatcacacagtattccacgggacaagtcagcgtggagattgagtgggagctgcagaaggagaacagcaaacgctggaaccccgagatccagtacacttccaactacaacaaatctgttaatgtggactttactgtggacactaatggcgtgtattcagagcctcgccccattggcaccagatacctgactcgtaatctgtaa

SEQ ID NO: 4515 - DNA, 2208 bp, synthetic construct
  misc_feature 1..2208: note = source = /note="Description of Artificial Sequence: Synthetic polynucleotide"
  source 1..2208: mol_type = other DNA
atggctgccgatggttatcttccagattggctcgaggacactctctctgaaggaataagacagtggtggaagctcaaacctggcccaccaccgccaaagcccgcagagcggcacaaggacgacagtaggggtcttgtgcttcctgggtacaagtacctcggacccttcaacggactcgacaaaggagagccggtcaacgaggcagacgccgcggccctcgagcacgacaaggcctacgaccggcagctcgacagcggagacaacccgtacctcaagtacaaccacgccgacgcggagtttcaggagcgtcttaaagaagatacgtcttttgggggcaacctcggacgagcagtattccaggcgaaaaagagggttcttgaacctctgggcctggttgaggagcctgttaagacggctccgggaaaaaagaggccggtagagcactctcctgtggagccagactcctcctcgggaaccggaaaagcgggccagcagcctgcaagaaaaagattgaattttggtcagactggagacgcagactccgtacctgacccccagcctctcggacagccaccagcagcccccacaagtttgggatctactacaatggctacaggcagtggcgcaccaatggcagacaataacgagggtgccgatggagtgggtaattcctcaggaaattggcattgcgattcccaatggctggacgacagagtcatcaccaccagcacccgaacctgggccctgcccacctacaacaaccacctctacaagcaaatctccagccaatcaggagcatcgaacgacaaccactactttggccacagcaccccttgggggtattttgacttcaacagattccactgtcacttctccccacgtgactggcaaagactcatcaacaacaactggggattccgacccaagagactcaacttcaagctctttaacattcaagtcaaagaggtcacgcagaatgacggtacgacgacgattgccaataaccttaccagcacggttcaggtgtttactgactcggagtaccagctcccgtacgtcctcggctcggcgcatcaaggatgcctcccgccgttcccagcagacgtcttcatggtcccacagtatggatacctcaccctgaacaacgggagtcaggcggtaggacgctcttccttttactgcctggagtactttccttctcagatgcttcgtaccggaaacaactttaccttcagctacacctttgaagacgtgcctttccacagtagctacgctcacagccagagtctggatcggctgatgaatcctcttatcgaccagtacctgtattatctaaacaaaacacaatcaaatagtggaactcttcagcagtctcggctactgtttagtcaagctggacccaccagcatgtctcttcaagctaaaaactggctgcctggaccttgctacagacaacagcgtctgtcaaagcaggcaaacgacaacaacaacagcaactttccctggactgcggctacaaagtatcatctaaatggccgggactcgttggttaatccaggaccagctatggccagccacaaagacgatgaagaaaagtttttccccatgcatggaaccctgatatttggtaaacaaggaacaaatgctaacgacgcggatttggacaatgtcatgattacagatgaagaagaaatccgcaccaccaatcccgtggctacggagcagtacgggactgtgtcaaataatttgcaaaactcaaatactggtccaactactggaactgtcaatcaccaaggagcgttacctggtatggtgtggcaggatcgagacgtgtacctgcagggacccatttgggccaagattcctcacaccgatggacactttcatccttctccactgatgggaggttttggactcaaacacccgcctcctcagatcatgatcaaaaacactcccgttccagccaatcctcctacaaacttcagttctgccaagtttgcttccttcatcacacagtattccacgggacaagtcagcgtggagattgagtgggagctgcagaaggagaacagcaaacgctggaaccccgagatccagtacacttccaactacaacaaatctgttaatgtggactttactgtggacactaatggcgtgtattcagagcctcgccccattggcaccagatacctgactcgtaatctgtaa

SEQ ID NO: 4516 - DNA, 2208 bp, synthetic construct
  misc_feature 1..2208: note = source = /note="Description of Artificial Sequence: Synthetic polynucleotide"
  source 1..2208: mol_type = other DNA
atggctgccgatggttatcttccagattggctcgaggacactctctctgaaggaataagacagtggtggaagctcaaacctggcccaccaccgccaaagcccgcagagcggcacaaggacgacagtaggggtcttgtgcttcctgggtacaagtacctcggacccttcaacggactcgacaaaggagagccggtcaacgaggcagacgccgcggccctcgagcacgacaaggcctacgaccggcagctcgacagcggagacaacccgtacctcaagtacaaccacgccgacgcggagtttcaggagcgtcttaaagaagatacgtcttttgggggcaacctcggacgagcagtattccaggcgaaaaagagggttcttgaacctctgggcctggttgaggagcctgttaagacggctccgggaaaaaagaggccggtagagcactctcctgtggagccaggctcctcctcgggaaccggaaaagcgggccagcagcctgcaagaaaaagattgaattttggtcagactggagacgcagactccgtacctgacccccagcctctcggacagccaccagcagcccccacaagtttgggatctactacaatggctacaggcagtggcgcaccaatggcagacaataacgagggtgccgatggagtgggtaattcctcaggaaattggcattgcgattcccaatggctgggcgacagagtcatcaccaccagcacccgaacctgggccctgcccacctacaacaaccacctctacaagcaaatctccagccaatcaggagcatcgaacgacaaccactactttggccacagcaccccttgggggtattttgacttcaacagattccactgtcacttctccccacgtgactggcaaagactcatcaacaacaactggggattccgacccaagagactcaacttcaagctctttaacattcaagtcaaagaggtcacgcagaatgacggtacgacgacgattgccaataaccttaccagcacggttcaggtgtttactgactcggagtaccagctcccgtacgtcctcggctcggcgcatcaaggatgcctcccgccgttcccagcagacgtcttcatggtcccacagtatggatacctcaccctgaacaacgggagtcaggcggtaggacgctcttccttttactgcctggagtactttccttctcagatgcttcgtaccggaaacaactttaccttcagctacacctttgaagacgtgcctttccacagtagctacgctcacagccagagtctggatcggctgatgaatcctcttatcgaccagtacctgtattatctaaacaaaacacaatcaaatagtggaactcttcagcagtctcggctactgtttagtcaagctggacccaccagcatgtctcttcaagctaaaaactggctgcctggaccttgctacagacaacagcgtctgtcaaagcaggcaaacgacaacaacaacagcaactttccctggactgcggctacaaagtatcatctaaatggccgggactcgttggttaatccaggaccagctatggccagccacaaagacgatgaagaaaagtttttccccatgcatggaaccctgatatttggtaaacaaggaacaaatgctaacgacgcggatttggacaatgtcatgattacagatgaagaagaaatccgcaccaccaatcccgtggctacggagcagtacgggactgtgtcaaataatttgcaaaactcaaatactggtccaactactggaactgtcaatcaccaaggagcgttacctggtatggtgtggcaggatcgagacgtgtacctgcagggacccatttgggccaagattcctcacaccgatggacactttcatccttctccactgatgggaggttttggactcaaacacccgcctcctcagatcatgatcaaaaacactcccgttccagccaatcctcctacaaacttcagttctgccaagtttgcttccttcatcacacagtattccacgggacaagtcagcgtggagattgagtgggagctgcagaaggagaacagcaaacgctggaaccccgagatccagtacacttccaactacaacaaatctgttaatgtggactttactgtggacactaatggcgtgtattcagagcctcgccccattggcaccagatacctgactcgtaatctgtaa

SEQ ID NO: 4517 - DNA, 2208 bp, synthetic construct
  misc_feature 1..2208: note = source = /note="Description of Artificial Sequence: Synthetic polynucleotide"
  source 1..2208: mol_type = other DNA
atggctgccgatggttatcttccagattggctcgaggacactctctctgaaggaataagacagtggtggaagctcaaacctggcccaccaccgccaaagcccgcagagcggcacaaggacgacagtaggggtcttgtgcttcctgggtacaagtacctcggacccttcaacggactcgacaaaggagagccggtcaacgaggcagacgccgcggccctcgagcacgacaaggcctacgaccggcagctcgacagcggagacaacccgtacctcaagtacaaccacgccgacgcggagtttcaggagcgtcttaaagaagatacgtcttttgggggcaacctcggacgagcagtattccaggcgaaaaagagggttcttgaacctctgggcctggttgaggagcctgttaagacggctccgggaaaaaagaggccggtagagcactctcctgtggagccagactcctcctcgggaaccggaaaagcgggccagcagcctgcaagaaaaagattgaattttggtcagactggagacgcagactccgtacctgacccccagcctctcggacagccaccagcagcccccacaagtttgggatctactacaatggctacaggcagtggcgcaccaatggcagacaataacgagggtgccgatggagtgggtaattcctcaggaaattggcattgcgattcccaatggctgggcgacagagtcatcaccaccagcacccgaacctgggccctgcccacctacaacaaccacctctacaagcaaatctccagccaatcaggagcatcgaacgacaaccactactttggccacagcaccccttgggggtattttgacttcaacagattccactgtcacttctccccacgtgactggcaaagactcatcaacaacaactggggattccgacccaagagactcaacttcaagctctttaacattcaagtcaaagaggtcacgcagaatgacggtacgacgacgattgccaataaccttaccagcacggttcaggtgtttactgactcggagtaccagctcccgtacgtcctcggctcggcgcatcaaggatgcctcccgccgttcccagcagacgtcttcatggtcccacagtatggatacctcaccctgaacaacgggagtcaggcggtaggacgctcttccttttactgcctggagtactttccttctcagatgcttcgtaccggaaacaactttaccttcagctacacctttgaagacgtgcctttccacagtagctacgctcacagccagagtctggatcggctgatgaatcctcttatcgaccagtacctgtattatctaaacaaaacacaatcaaatagtggaactcttcagcagtctcggctactgtttagtcaagctggacccaccagcatgtctcttcaagctaaaaactggctgcctggaccttgctacagacaacagcgtctgtcaaagcaggcaaacgacaacaacaacagcaactttccctggactgcggctacaaagtatcatctaaatggccgggactcgttggttaatccaggaccagctatggccagccacaaagacgatgaagaaaagtttttccccatgcatggaaccctgatatttggtaaacaaggaacaaatgctaacgacgcggatttggacaatgtcatgattacagatgaagaagaaatccgcaccaccaatcccgtggctacggagcagtacgggactgtgtcaaataatttgcaaaactcaaatactggtccaactactggaactgtcaatcaccaaggagcgttacctggtatggtgtggcaggatcgagacgtgtacctgcagggacccatttgggccaagattcctcacaccgatggacactttcatccttctccactgatgggaggttttggactcaaacacccgcctcctcagatcatgatcaaaaacactcccgttccagccaatcctcctacaaacttcagttctgccaagtttgcttccttcatcacacagtattccacgggacaagtcagcgtggagattgggtgggagctgcagaaggagaacagcaaacgctggaaccccgagatccagtacacttccaactacaacaaatctgttaatgtggactttactgtggacactaatggcgtgtattcagagcctcgccccattggcaccagatacctgactcgtaatctgtaa

SEQ ID NO: 4518 - DNA, 2208 bp, synthetic construct
  misc_feature 1..2208: note = source = /note="Description of Artificial Sequence: Synthetic polynucleotide"
  source 1..2208: mol_type = other DNA
atggctgccgatggttatcttccagattggctcgaggacactctctctgaaggaataagacagtggtggaagctcaaacctggcccaccaccgccaaagcccgcagagcggcacaaggacgacagtaggggtcttgtgcttcctgggtacaagtacctcggacccttcaacggactcgacaaaggagagccggtcaacgaggcagacgccgcggccctcgagcacgacaaggcctacgaccggcagctcgacagcggagacaacccgtacctcaagtacaaccacgccgacgcggagtttcaggagcgtcttaaagaagatacgtcttttgggggcaacctcggacgagcagtattccaggcgaaaaagagggttcttgaacctctgggcctggttgaggagcctgttaagacggctccgggaaaaaagaggccggtagagcactctcctgtggagccagactcctcctcgggaaccggaaaagcgggccagcagcctgcaagaaaaagattgaattttggtcagactggagacgcagactccgtacctgacccccagcctctcggacagccaccagcagcccccacaagtttgggatctactacaatggctacaggcagtggcgcaccaatggcagacaataacgagggtgccgatggagtgggtaattcctcaggaaattggcattgcgattcccaatggctgggcgacagagtcatcaccaccagcacccgaacctgggccctgcccacctacaacaaccacctctacaagcaaatctccagccaatcaggagcatcgaacgacaaccactactttggccacagcaccccttgggggtattttgacttcaacagattccactgtcacttctccccacgtgactggcaaagactcatcaacaacaactggggattccgacccaagagactcaacttcaagctctttaacattcaagtcaaagaggtcacgcagaatgacggtacgacgacgattgccaataaccttaccagcacggttcaggtgtttactgactcggagtaccagctcccgtacgtcctcggctcggcgcatcaaggatgcctcccgccgttcccagcagacgtcttcatggtcccacagtatggatacctcaccctgaacaacgggagtcaggcggtaggacgctcttccttttactgcctggagtactttccttctcagatgcttcgtaccggaaacaactttaccttcagctacacctttgaagacgtgcctttccacagtagctacgctcacagccagagtctggatcggctgatgaatcctcttatcgaccggtacctgtattatctaaacaaaacacaatcaaatagtggaactcttcagcagtctcggctactgtttagtcaagctggacccaccagcatgtctcttcaagctaaaaactggctgcctggaccttgctacagacaacagcgtctgtcaaagcaggcaaacgacaacaacaacagcaactttccctggactgcggctacaaagtatcatctaaatggccgggactcgttggttaatccaggaccagctatggccagccacaaagacgatgaagaaaagtttttccccatgcatggaaccctgatatttggtaaacaaggaacaaatgctaacgacgcggatttggacaatgtcatgattacagatgaagaagaaatccgcaccaccaatcccgtggctacggagcagtacgggactgtgtcaaataatttgcaaaactcaaatactggtccaactactggaactgtcaatcaccaaggagcgttacctggtatggtgtggcaggatcgagacgtgtacctgcagggacccatttgggccaagattcctcacaccgatggacactttcatccttctccactgatgggaggttttggactcaaacacccgcctcctcagatcatgatcaaaaacactcccgttccagccaatcctcctacaaacttcagttctgccaagtttgcttccttcatcacacagtattccacgggacaagtcagcgtggagattgagtgggagctgcagaaggagaacagcaaacgctggaaccccgagatccagtacacttccaactacaacaaatctgttaatgtggactttactgtggacactaatggcgtgtattcagagcctcgccccattggcaccagatacctgactcgtaatctgtaa

SEQ ID NO: 4519 - DNA, 2208 bp, synthetic construct
  misc_feature 1..2208: note = source = /note="Description of Artificial Sequence: Synthetic polynucleotide"
  source 1..2208: mol_type = other DNA
atggctgccgatggttatcttccagattggctcgaggacactctctctgaaggaataagacagtggtggaagctcaaacctggcccaccaccgccaaagcccgcagagcggcacaaggacgacagtaggggtcttgtgcttcctgggtacaagtacctcggacccttcaacggactcgacaaaggagagccggtcaacgaggcagacgccgcggccctcgagcacgacaaggcctacgaccggcagctcgacagcggagacaacccgtacctcaagtacaaccacgccgacgcggagtttcaggagcgtcttaaagaagatacgtcttttgggggcaacctcggacgagcagtattccaggcgaaaaagagggttcttgaacctctgggcctggttgaggagcctgttaagacggctccgggaaaaaagaggccggtagagcactctcctgtggagccagactcctcctcgggaaccggaaaagcgggccagcagcctgcaagaaaaagattgaattttggtcagactggagacgcagactccgtacctgacccccagcctctcggacagccaccagcagcccccacaagtttgggatctactacaatggctacaggcagtggcgcaccaatggcagacaataacgagggtgccgatggagtgggtaattcctcaggaaattggcattgcgattcccaatggctgggcgacagagtcatcaccaccagcacccgaacctgggccctgcccacctacaacaaccacctctacaagcaaatctccagccaatcaggagcatcgaacgacaaccactactttggccacagcaccccttgggggtattttgacttcaacagattccactgtcacttctccccacgtgactggcaaagactcatcaacaacaactggggattccgacccaagagactcaacttcaagctctttaacattcaagtcaaagaggtcacgcagaatgacggtacgacgacgattgccaataaccttaccagcacggttcaggtgtttactgactcggagtaccagctcccgtacgtcctcggctcggcgcatcaaggatgcctcccgccgttcccagcagacgtcttcatggtcccacagtatggatacctcaccctgaacaacgggagtcaggcggtaggacgctcttccttttactgcctggagtactttccttctcagatgcttcgtaccggaaacaactttaccttcagctacacctttgaagacgtgcctttccacagtagctacgctcacagccagagtctggatcggctgatgaatcctcttatcgaccagcacctgtattatctaaacaaaacacaatcaaatagtggaactcttcagcagtctcggctactgtttagtcaagctggacccaccagcatgtctcttcaagctaaaaactggctgcctggaccttgctacagacaacagcgtctgtcaaagcaggcaaacgacaacaacaacagcaactttccctggactgcggctacaaagtatcatctaaatggccgggactcgttggttaatccaggaccagctatggccagccacaaagacgatgaagaaaagtttttccccatgcatggaaccctgatatttggtaaacaaggaacaaatgctaacgacgcggatttggacaatgtcatgattacagatgaagaagaaatccgcaccaccaatcccgtggctacggagcagtacgggactgtgtcaaataatttgcaaaactcaaatactggtccaactactggaactgtcaatcaccaaggagcgttacctggtatggtgtggcaggatcgagacgtgtacctgcagggacccatttgggccaagattcctcacaccgatggacactttcatccttctccactgatgggaggttttggactcaaacacccgcctcctcagatcatgatcaaaaacactcccgttccagccaatcctcctacaaacttcagttctgccaagtttgcttccttcatcacacagtattccacgggacaagtcagcgtggagattgagtgggagctgcagaaggagaacagcaaacgctggaaccccgagatccagtacacttccaactacaacaaatctgttaatgtggactttactgtggacactaatggcgtgtattcagagcctcgccccattggcaccagatacctgactcgtaatctgtaa

SEQ ID NO: 4520 - DNA, 2208 bp, synthetic construct
  misc_feature 1..2208: note = source = /note="Description of Artificial Sequence: Synthetic polynucleotide"
  source 1..2208: mol_type = other DNA
atggctgccgatggttatcttccagattggctcgaggacactctctctgaaggaataagacagtggtggaagctcaaacctggcccaccaccgccaaagcccgcagagcggcacaaggacgacagtaggggtcctgtgcttcctgggtacaagtacctcggacccttcaacggactcgacaaaggagagccggtcaacgaggcagacgccgcggccctcgagcacgacaaggcctacgaccggcagctcgacagcggagacaacccgtacctcaagtacaaccacgccgacgcggagtttcaggagcgtcttaaagaagatacgtcttttgggggcaacctcggacgagcagtattccaggcgaaaaagagggttcttgaacctctgggcctggttgaggagcctgttaagacggctccgggaaaaaagaggccggtagagcactctcctgtggagccagactcctcctcgggaaccggaaaagcgggccagcagcctgcaagaaaaagattgaattttggtcagactggagacgcagactccgtacctgacccccagcctctcggacagccaccagcagcccccacaagtttgggatctactacaatggctacaggcagtggcgcaccaatggcagacaataacgagggtgccgatggagtgggtaattcctcaggaaattggcattgcgattcccaatggctgggcgacagagtcatcaccaccagcacccgaacctgggccctgcccacctacaacaaccacctctacaagcaaatctccagccaatcaggagcatcgaacgacaaccactactttggccacagcaccccttgggggtattttgacttcaacagattccactgtcacttctccccacgtgactggcaaagactcatcaacaacaactggggattccgacccaagagactcaacttcaagctctttaacattcaagtcaaagaggtcacgcagaatgacggtacgacgacgattgccaataaccttaccagcacggttcaggtgtttactgactcggagtaccagctcccgtacgtcctcggctcggcgcatcaaggatgcctcccgccgttcccagcagacgtcttcatggtcccacagtatggatacctcaccctgaacaacgggagtcaggcggtaggacgctcttccttttactgcctggagtactttccttctcagatgcttcgtaccggaaacaactttaccttcagctacacctttgaagacgtgcctttccacagtagctacgctcacagccagagtctggatcggctgatgaatcctcttatcgaccagtacctgtattatctaaacaaaacacaatcaaatagtggaactcttcagcagtctcggctactgtttagtcaagctggacccaccagcatgtctcttcaagctaaaaactggctgcctggaccttgctacagacaacagcgtctgtcaaagcaggcaaacgacaacaacaacagcaactttccctggactgcggctacaaagtatcatctaaatggccgggactcgttggttaatccaggaccagctatggccagccacaaagacgatgaagaaaagtttttccccatgcatggaaccctgatatttggtaaacaaggaacaaatgctaacgacgcggatttggacaatgtcatgattacagatgaagaagaaatccgcaccaccaatcccgtggctacggagcagtacgggactgtgtcaaataatttgcaaaactcaaatactggtccaactactggaactgtcaatcaccaaggagcgttacctggtatggtgtggcaggatcgagacgtgtacctgcagggacccatttgggccaagattcctcacaccgatggacactttcatccttctccactgatgggaggttttggactcaaacacccgcctcctcagatcatgatcaaaaacactcccgttccagccaatcctcctacaaacttcagttctgccaagtttgcttccttcatcacacagtattccacgggacaagtcagcgtggagattgagtgggagctgcagaaggagaacagcaaacgctggaaccccgagatccagtacacttccaactacaacaaatctgttaatgtggactttactgtggacactaatggcgtgtattcagagcctcgccccattggcaccagatacctgactcgtaatctgtaa

SEQ ID NO: 4521 - DNA, 2208 bp, synthetic construct
  misc_feature 1..2208: note = source = /note="Description of Artificial Sequence: Synthetic polynucleotide"
  source 1..2208: mol_type = other DNA
atggctgccgatggttatcttccagattggctcgaggacactctctctgaaggaataagacagtggtggaagctcaaacctggcccaccaccgccaaagcccgcagagcggcacaaggacgacagtaggggtcttgtgcttcctgggtacaagtacctcggacccttcaacggactcgacaaaggagagccggtcaacgaggcaggcgccgcggccctcgagcacgacaaggcctacgaccggcagctcgacagcggagacaacccgtacctcaagtacaaccacgccgacgcggagtttcaggagcgtcttaaagaagatacgtcttttgggggcaacctcggacgagcagtattccaggcgaaaaagagggttcttgaacctctgggcctggttgaggagcctgttaagacggctccgggaaaaaagaggccggtagagcactctcctgtggagccagactcctcctcgggaaccggaaaagcgggccagcagcctgcaagaaaaagattgaattttggtcagactggagacgcagactccgtacctgacccccagcctctcggacagccaccagcagcccccacaagtttgggatctactacaatggctacaggcagtggcgcaccaatggcagacaataacgagggtgccgatggagtgggtaattcctcaggaaattggcattgcgattcccaatggctgggcgacagagtcatcaccaccagcacccgaacctgggccctgcccacctacaacaaccacctctacaagcaaatctccagccaatcaggagcatcgaacgacaaccactactttggccacagcaccccttgggggtattttgacttcaacagattccactgtcacttctccccacgtgactggcaaagactcatcaacaacaactggggattccgacccaagagactcaacttcaagctctttaacattcaagtcaaagaggtcacgcagaatgacggtacgacgacgattgccaataaccttaccagcacggttcaggtgtttactgactcggagtaccagctcccgtacgtcctcggctcggcgcatcaaggatgcctcccgccgttcccagcagacgtcttcatggtcccacagtatggatacctcaccctgaacaacgggagtcaggcggtaggacgctcttccttttactgcctggagtactttccttctcagatgcttcgtaccggaaacaactttaccttcagctacacctttgaagacgtgcctttccacagtagctacgctcacagccagagtctggatcggctgatgaatcctcttatcgaccagtacctgtattatctaaacaaaacacaatcaaatagtggaactcttcagcagtctcggctactgtttagtcaagctggacccaccagcatgtctcttcaagctaaaaactggctgcctggaccttgctacagacaacagcgtctgtcaaagcaggcaaacgacaacaacaacagcaactttccctggactgcggctacaaagtatcatctaaatggccgggactcgttggttaatccaggaccagctatggccagccacaaagacgatgaagaaaagtttttccccatgcatggaaccctgatatttggtaaacaaggaacaaatgctaacgacgcggatttggacaatgtcatgattacagatgaagaagaaatccgcaccaccaatcccgtggctacggagcagtacgggactgtgtcaaataatttgcaaaactcaaatactggtccaactactggaactgtcaatcaccaaggagcgttacctggtatggtgtggcaggatcgagacgtgtacctgcagggacccatttgggccaagattcctcacaccgatggacactttcatccttctccactgatgggaggttttggactcaaacacccgcctcctcagatcatgatcaaaaacactcccgttccagccaatcctcctacaaacttcagttctgccaagtttgcttccttcatcacacagtattccacgggacaagtcagcgtggagattgagtgggagctgcagaaggagaacagcaaacgctggaaccccgagatccagtacacttccaactacaacaaatctgttaatgtggactttactgtggacactaatggcgtgtattcagagcctcgccccattggcaccagatacctgactcgtaatctgtaa

SEQ ID NO: 4522 - DNA, 2208 bp, synthetic construct
  misc_feature 1..2208: note = source = /note="Description of Artificial Sequence: Synthetic polynucleotide"
  source 1..2208: mol_type = other DNA
atggctgccgatggttatcttccagattggctcgaggacactctctctgaaggaataagacagtggtggaagctcaaacctggcccaccaccgccaaagcccgcagagcggcacaaggacgacagtaggggtcttgtgcttcctgggtacaagtacctcggacccttcaacggactcgacaaaggagagccggtcaacggggcagacgccgcggccctcgagcacgacaaggcctacgaccggcagctcgacagcggagacaacccgtacctcaagtacaaccacgccgacgcggagtttcaggagcgtcttaaagaagatacgtcttttgggggcaacctcggacgagcagtattccaggcgaaaaagagggttcttgaacctctgggcctggttgaggagcctgttaagacggctccgggaaaaaagaggccggtagagcactctcctgtggagccagactcctcctcgggaaccggaaaagcgggccagcagcctgcaagaaaaagattgaattttggtcagactggagacgcagactccgtacctgacccccagcctctcggacagccaccagcagcccccacaagtttgggatctactacaatggctacaggcagtggcgcaccaatggcagacaataacgagggtgccgatggagtgggtaattcctcaggaaattggcattgcgattcccaatggctgggcgacagagtcatcaccaccagcacccgaacctgggccctgcccacctacaacaaccacctctacaagcaaatctccagccaatcaggagcatcgaacgacaaccactactttggccacagcaccccttgggggtattttgacttcaacagattccactgtcacttctccccacgtgactggcaaagactcatcaacaacaactggggattccgacccaagagactcaacttcaagctctttaacattcaagtcaaagaggtcacgcagaatgacggtacgacgacgattgccaataaccttaccagcacggttcaggtgtttactgactcggagtaccagctcccgtacgtcctcggctcggcgcatcaaggatgcctcccgccgttcccagcagacgtcttcatggtcccacagtatggatacctcaccctgaacaacgggagtcaggcggtaggacgctcttccttttactgcctggagtactttccttctcagatgcttcgtaccggaaacaactttaccttcagctacacctttgaagacgtgcctttccacagtagctacgctcacagccagagtctggatcggctgatgaatcctcttatcgaccagtacctgtattatctaaacaaaacacaatcaaatagtggaactcttcagcagtctcggctactgtttagtcaagctggacccaccagcatgtctcttcaagctaaaaactggctgcctggaccttgctacagacaacagcgtctgtcaaagcaggcaaacgacaacaacaacagcaactttccctggactgcggctacaaagtatcatctaaatggccgggactcgttggttaatccaggaccagctatggccagccacaaagacgatgaagaaaagtttttccccatgcatggaaccctgatatttggtaaacaaggaacaaatgctaacgacgcggatttggacaatgtcatgattacagatgaagaagaaatccgcaccaccaatcccgtggctacggagcagtacgggactgtgtcaaataatttgcaaaactcaaatactggtccaactactggaactgtcaatcaccaaggagcgttacctggtatggtgtggcaggatcgagacgtgtacctgcagggacccatttgggccaagattcctcacaccgatggacactttcatccttctccactgatgggaggttttggactcaaacacccgcctcctcagatcatgatcaaaaacactcccgttccagccaatcctcctacaaacttcagttctgccaagtttgcttccttcatcacacagtattccacgggacaagtcagcgtggagattgagtgggagctgcagaaggagaacagcaaacgctggaaccccgagatccagtacacttccaactacaacaaatctgttaatgtggactttactgtggacactaatggcgtgtattcagagcctcgccccattggcaccagatacctgactcgtaatctgtaa

SEQ ID NO: 4523 - DNA, 2208 bp, synthetic construct
  misc_feature 1..2208: note = source = /note="Description of Artificial Sequence: Synthetic polynucleotide"
  source 1..2208: mol_type = other DNA
atggctgccgatggttatcttccagattggctcgaggacactctctctgaaggaataagacagtggtggaagctcaaacctggcccaccaccgccaaagcccgcagagcggcacaaggacgacagtaggggtcttgtgcttcctgggtacaagtacctcggacccttcaacggactcgacaaaggagagccggtcaacgaggcagacgccgcggccctcgagcacgacaaggcctacgaccggcagctcgacagcggagacaacccgtacctcaagtacaaccacgccgacgcggagtttcaggagcgtcttaaagaagatacgtcttttgggggcaacctcggacgagcagtattccaggcgaaaaagagggttcttgaacctctgggcctggttgaggagcctgttaagacggctccgggaaaaaagaggccggtagagcactctcctgtggagccagactcctcctcgggaaccggaaaagcgggccagcagcctgcaagaaaaagattgaattttggtcagactggagacgcagactccgtacctgacccccagcctctcggacagccaccagcagcccccacaagtttgggatctactacaatggctacaggcagtggcgcaccaatggcagacaataacgagggtgccgatggagtgggtaattcctcaggaaattggcattgcgattcccaatggctgggcgacagagtcatcaccaccagcacccgaacctgggccctgcccacctacaacaaccacctctacaagcaaatctccagccaatcaggagcatcgaacgacaaccactactttggccacagcaccccttgggggtattttgacttcaacagattccactgtcacttctccccacgtgactggcaaagactcatcaacaacaactggggattccgacccaagagactcaacttcaagctctttaacattcaagtcaaagaggtcacgcagaatgacggtacgacgacgattgccaataaccttaccagcacggttcaggtgtttactgactcggagtaccagctcccgtacgtcctcggctcggcgcatcaaggatgcctcccgccgttcccagcagacgtcttcatggtcccacagtatggatacctcaccctgaacaacgggagtcaggcggtaggacgctcttccctttactgcctggagtactttccttctcagatgcttcgtaccggaaacaactttaccttcagctacacctttgaagacgtgcctttccacagtagctacgctcacagccagagtctggatcggctgatgaatcctcttatcgaccagtacctgtattatctaaacaaaacacaatcaaatagtggaactcttcagcagtctcggctactgtttagtcaagctggacccaccagcatgtctcttcaagctaaaaactggctgcctggaccttgctacagacaacagcgtctgtcaaagcaggcaaacgacaacaacaacagcaactttccctggactgcggctacaaagtatcatctaaatggccgggactcgttggttaatccaggaccagctatggccagccacaaagacgatgaagaaaagtttttccccatgcatggaaccctgatatttggtaaacaaggaacaaatgctaacgacgcggatttggacaatgtcatgattacagatgaagaagaaatccgcaccaccaatcccgtggctacggagcagtacgggactgtgtcaaataatttgcaaaactcaaatactggtccaactactggaactgtcaatcaccaaggagcgttacctggtatggtgtggcaggatcgagacgtgtacctgcagggacccatttgggccaagattcctcacaccgatggacactttcatccttctccactgatgggaggttttggactcaaacacccgcctcctcagatcatgatcaaaaacactcccgttccagccaatcctcctacaaacttcagttctgccaagtttgcttccttcatcacacagtattccacgggacaagtcagcgtggagattgagtgggagctgcagaaggagaacagcaaacgctggaaccccgagatccagtacacttccaactacaacaaatctgttaatgtggactttactgtggacactaatggcgtgtattcagagcctcgccccattggcaccagatacctgactcgtaatctgtaa

SEQ ID NO: 4524 - DNA, 2208 bp, synthetic construct
  misc_feature 1..2208: note = source = /note="Description of Artificial Sequence: Synthetic polynucleotide"
  source 1..2208: mol_type = other DNA
atggctgccgatggttatcttccagattggctcgaggacactctctctgaaggaataagacagtggtggaagctcaaacctggcccaccaccgccaaagcccgcagagcggcacaaggacgacagtaggggtcttgtgcttcctgggtacaagtacctcggacccttcaacggactcgacaaaggagagccggtcaacgaggcagacgccgcggccctcgagcacgacaaggcctacgaccggcagctcgacagcggagacaacccgtacctcaagtacaaccacgccgacgcggagtttcaggagcgtcttaaagaagatacgtcttttgggggcaacctcggacgagcagtattccaggcgaaaaagagggttcttgaacctctgggcctggttgaggagcctgttaagacggctccgggaaaaaagaggccggtagagcactctcctgtggagccagactcctcctcgggaaccggaaaagcgggccagcagcctgcaagaaaaagattgaattttggtcagactggagacgcagactccgtacctgacccccagcctctcggacagccaccagcagcccccacaagtttgggatctactacaatggctacaggcagtggcgcaccaatggcagacaataacgagggtgccgatggagtgggtaattcctcaggaaattggcattgcgattcccaatggctgggcgacagagtcatcaccaccagcacccgaacctgggccctgcccacctacaacaaccacctctacaagcaaatctccagccaatcaggagcatcgaacgacaaccactactttggccacagcaccccttgggggtattttgacttcaacagattccactgtcacttctccccacgtgactggcaaagactcatcaacaacaactggggattccgacccaagagactcaacttcaagctctttaacattcaagtcaaagaggtcacgcagaatgacggtacgacgacgattgccaataaccttaccagcacggttcaggtgtttactgactcggagtaccagctcccgtacgtcctcggctcggcgcatcaaggatgcctcccgccgttcccagcagacgtcttcatggtcccacagtatggatacctcaccctgaacaacgggagtcaggcggtaggacgctcttccttttactgcctggagtactttccttctcagatgcttcgtaccggaaacaactttacctccagctacacctttgaagacgtgcctttccacagtagctacgctcacagccagagtctggatcggctgatgaatcctcttatcgaccagtacctgtattatctaaacaaaacacaatcaaatagtggaactcttcagcagtctcggctactgtttagtcaagctggacccaccagcatgtctcttcaagctaaaaactggctgcctggaccttgctacagacaacagcgtctgtcaaagcaggcaaacgacaacaacaacagcaactttccctggactgcggctacaaagtatcatctaaatggccgggactcgttggttaatccaggaccagctatggccagccacaaagacgatgaagaaaagtttttccccatgcatggaaccctgatatttggtaaacaaggaacaaatgctaacgacgcggatttggacaatgtcatgattacagatgaagaagaaatccgcaccaccaatcccgtggctacggagcagtacgggactgtgtcaaataatttgcaaaactcaaatactggtccaactactggaactgtcaatcaccaaggagcgttacctggtatggtgtggcaggatcgagacgtgtacctgcagggacccatttgggccaagattcctcacaccgatggacactttcatccttctccactgatgggaggttttggactcaaacacccgcctcctcagatcatgatcaaaaacactcccgttccagccaatcctcctacaaacttcagttctgccaagtttgcttccttcatcacacagtattccacgggacaagtcagcgtggagattgagtgggagctgcagaaggagaacagcaaacgctggaaccccgagatccagtacacttccaactacaacaaatctgttaatgtggactttactgtggacactaatggcgtgtattcagagcctcgccccattggcaccagatacctgactcgtaatctgtaa

SEQ ID NO: 4525 - DNA, 2208 bp, synthetic construct
  misc_feature 1..2208: note = source = /note="Description of Artificial Sequence: Synthetic polynucleotide"
  source 1..2208: mol_type = other DNA
atggctgccgatggttatcttccagattggctcgaggacactctctctgaaggaataagacagtggtggaagctcaaacctggcccaccaccgccaaagcccgcagagcggcacaaggacgacagtaggggtcttgtgcttcctgggtacaagtacctcggacccttcaacggactcgacaaaggagagccggtcaacgaggcagacgccgcggccctcgagcacgacaaggcctacgaccggcagctcgacagcggagacaacccgtacctcaagtacaaccacgccgacgcggagtttcaggagcgtcttaaagaagatacgtcttttgggggcaacctcggacgagcagtattccaggcgaaaaagagggttcttgaacctctgggcctggttgaggagcctgttaagacggctccgggaaaaaagaggccggtagagcactctcctgtggagccagactcctcctcgggaaccggaaaagcgggccagcagcctgcaagaaaaagattgaattttggtcagactggagacgcagactccgtacctgacccccagcctctcggacagccaccagcagcccccacaagtttgggatctactacaatggctacaggcagtggcgcaccaatggcagacaataacgagggtgccgatggagtgggtaattcctcaggaaattggcattgcgattcccaatggctgggcgacggagtcatcaccaccagcacccgaacctgggccctgcccacctacaacaaccacctctacaagcaaatctccagccaatcaggagcatcgaacgacaaccactactttggccacagcaccccttgggggtattttgacttcaacagattccactgtcacttctccccacgtgactggcaaagactcatcaacaacaactggggattccgacccaagagactcaacttcaagctctttaacattcaagtcaaagaggtcacgcagaatgacggtacgacgacgattgccaataaccttaccagcacggttcaggtgtttactgactcggagtaccagctcccgtacgtcctcggctcggcgcatcaaggatgcctcccgccgttcccagcagacgtcttcatggtcccacagtatggatacctcaccctgaacaacgggagtcaggcggtaggacgctcttccttttactgcctggagtactttccttctcagatgcttcgtaccggaaacaactttaccttcagctacacctttgaagacgtgcctttccacagtagctacgctcacagccagagtctggatcggctgatgaatcctcttatcgaccagtacctgtattatctaaacaaaacacaatcaaatagtggaactcttcagcagtctcggctactgtttagtcaagctggacccaccagcatgtctcttcaagctaaaaactggctgcctggaccttgctacagacaacagcgtctgtcaaagcaggcaaacgacaacaacaacagcaactttccctggactgcggctacaaagtatcatctaaatggccgggactcgttggttaatccaggaccagctatggccagccacaaagacgatgaagaaaagtttttccccatgcatggaaccctgatatttggtaaacaaggaacaaatgctaacgacgcggatttggacaatgtcatgattacagatgaagaagaaatccgcaccaccaatcccgtggctacggagcagtacgggactgtgtcaaataatttgcaaaactcaaatactggtccaactactggaactgtcaatcaccaaggagcgttacctggtatggtgtggcaggatcgagacgtgtacctgcagggacccatttgggccaagattcctcacaccgatggacactttcatccttctccactgatgggaggttttggactcaaacacccgcctcctcagatcatgatcaaaaacactcccgttccagccaatcctcctacaaacttcagttctgccaagtttgcttccttcatcacacagtattccacgggacaagtcagcgtggagattgagtgggagctgcagaaggagaacagcaaacgctggaaccccgagatccagtacacttccaactacaacaaatctgttaatgtggactttactgtggacactaatggcgtgtattcagagcctcgccccattggcaccagatacctgactcgtaatctgtaa

SEQ ID NO: 4526 - DNA, 2208 bp, synthetic construct
  misc_feature 1..2208: note = source = /note="Description of Artificial Sequence: Synthetic polynucleotide"
  source 1..2208: mol_type = other DNA
atggctgccgatggttatcttccagattggctcgaggacactctctctgaaggaataagacagtggtggaagctcaaacctggcccaccaccgccaaagcccgcagagcggcacaaggacgacagtaggggtcttgtgcttcctgggtacaagtacctcggacccttcaacggactcgacaaaggagagccggtcaacgaggcagacgccgcggccctcgagcacgacaaggcctacgaccggcagctcgacagcggagacaacccgtacctcaagtacaaccacgccgacgcggagtttcaggagcgtcttaaagaagatacgtcttttgggggcaacctcggacgagcagtattccaggcgaaaaagagggttcttgaacctctgggcctggttgaggagcctgttaagacggctccgggaaaaaagaggccggtagagcactctcctgtggagccagactcctcctcgggaaccggaaaagcgggccagcagcctgcaagaaaaagattgaattttggtcagactggagacgcagactccgtacctgacccccagcctctcggacagccaccagcagcccccacaagtttgggatctactacaatggctacaggcagtggcgcaccaatggcagacaataacgagggtgccgatggagtgggtaattcctcaggaaattggcattgcgattcccaatggctgggcgacagagtcatcaccaccagcacccgaacctgggccctgcccacctacaacaaccacctctacaagcaaatctccagccaatcaggagcatcgaacgacaaccactactttggccacagcaccccttgggggtattttgacttcaacagattccactgtcacttctccccacgtgactggcaaagactcatcaacaacaactggggattccgacccaagagactcaacttcaagctctttaacattcaagtcaaagaggtcacgcagaatgacggtacgacgacgattgccaataaccttaccagcacggttcaggtgtttactgactcggagtaccagctcccgtacgtcctcggctcggcgcatcaaggatgcctcccgccgttcccagcagacgtcttcatggtcccacagtatggatacctcaccctgaacaacgggagtcaggcggtaggacgctcttccttttactgcctggagtactttccttctcagatgcttcgtaccggaaacaactttaccttcagctacacctttgaagacgtgcctttccacagtagctacgctcacagccagagtctggatcggctgatgaatcctcttatcgaccagtacctgtattatctaaacaaaacacaatcaaatagtggaactcttcagcagtctcggctactgtttagtcaagctggacccaccagcatgtctcttcaagctaaaaactggctgcctggaccttgctacagacaacagcgtctgtcaaagcaggcaaacgacaacaacaacagcaactttccctggactgcggctacaaagtatcatctaaatggccgggactcgttggttaatccaggaccagctatggccagccacaaagacgatgaagaaaagtttttccccatgcatggaaccctgatatttggtaaacaaggaacaaatgctaacgacgcggatttggacaatgtcatgattacagatgaagaagaaatccgcaccaccaatcccgtggctacggagcagtacaggactgtgtcaaataatttgcaaaactcaaatactggtccaactactggaactgtcaatcaccaaggagcgttacctggtatggtgtggcaggatcgagacgtgtacctgcagggacccatttgggccaagattcctcacaccgatggacactttcatccttctccactgatgggaggttttggactcaaacacccgcctcctcagatcatgatcaaaaacactcccgttccagccaatcctcctacaaacttcagttctgccaagtttgcttccttcatcacacagtattccacgggacaagtcagcgtggagattgagtgggagctgcagaaggagaacagcaaacgctggaaccccgagatccagtacacttccaactacaacaaatctgttaatgtggactttactgtggacactaatggcgtgtattcagagcctcgccccattggcaccagatacctgactcgtaatctgtaa

SEQ ID NO: 4527 - DNA, 2208 bp, synthetic construct
  misc_feature 1..2208: note = source = /note="Description of Artificial Sequence: Synthetic polynucleotide"
  source 1..2208: mol_type = other DNA
atggctgccgatggttatcttccagattggctcgaggacactctctctgaaggaataagacagtggtggaagctcaaacctggcccaccaccgccaaagcccgcagagcggcacaaggacgacagtaggggtcttgtgcttcctgggtacaagtacctcggacccttcaacggactcgacaaaggagagccggtcaacgaggcagacgccgcggccctcgagcacgacaaggcctacgaccggcagctcgacagcggagacaacccgtacctcaagtacaaccacgccgacgcggagtttcaggagcgtcttaaagaagatacgtcttttgggggcaacctcggacgagcagtattccaggcgaaaaagagggttcttgaacctctgggcctggttgaggagcctgttaagacggctccgggaaaaaagaggccggtagagcactctcctgtggagccagactcctcctcgggaaccggaaaagcgggccagcagcctgcaagaaaaagattgaattttggtcagactggagacgcagactccgtacctgacccccagcctctcggacagccaccagcagcccccacaagtttgggatctactacaatggctacaggcagtggcgcaccaatggcagacaataacgagggtgccgatggagtgggtaattcctcaggaaattggcattgcgattcccaatggctgggcgacagagtcatcaccaccagcacccgaacctgggccctgcccacctacaacaaccacctctacaagcaaatctccagccaatcaggagcatcgaacgacaaccactactttggccacagcaccccttgggggtattttgacttcaacagattccactgtcacttctccccacgtgactggcaaagactcatcaacaacaactggggattccgacccaagagactcaacttcaagctctttaacattcaagtcaaagaggtcacgcagaatgacggtacgacgacgattgccaataaccttaccagcacggttcgggtgtttactgactcggagtaccagctcccgtacgtcctcggctcggcgcatcaaggatgcctcccgccgttcccagcagacgtcttcatggtcccacagtatggatacctcaccctgaacaacgggagtcaggcggtaggacgctcttccttttactgcctggagtactttccttctcagatgcttcgtaccggaaacaactttaccttcagctacacctttgaagacgtgcctttccacagtagctacgctcacagccagagtctggatcggctgatgaatcctcttatcgaccagtacctgtattatctaaacaaaacacaatcaaatagtggaactcttcagcagtctcggctactgtttagtcaagctggacccaccagcatgtctcttcaagctaaaaactggctgcctggaccttgctacagacaacagcgtctgtcaaagcaggcaaacgacaacaacaacagcaactttccctggactgcggctacaaagtatcatctaaatggccgggactcgttggttaatccaggaccagctatggccagccacaaagacgatgaagaaaagtttttccccatgcatggaaccctgatatttggtaaacaaggaacaaatgctaacgacgcggatttggacaatgtcatgattacagatgaagaagaaatccgcaccaccaatcccgtggctacggagcagtacgggactgtgtcaaataatttgcaaaactcaaatactggtccaactactggaactgtcaatcaccaaggagcgttacctggtatggtgtggcaggatcgagacgtgtacctgcagggacccatttgggccaagattcctcacaccgatggacactttcatccttctccactgatgggaggttttggactcaaacacccgcctcctcagatcatgatcaaaaacactcccgttccagccaatcctcctacaaacttcagttctgccaagtttgcttccttcatcacacagtattccacgggacaagtcagcgtggagattgagtgggagctgcagaaggagaacagcaaacgctggaaccccgagatccagtacacttccaactacaacaaatctgttaatgtggactttactgtggacactaatggcgtgtattcagagcctcgccccattggcaccagatacctgactcgtaatctgtaa

SEQ ID NO: 4528 - DNA, 2208 bp, synthetic construct
  misc_feature 1..2208: note = source = /note="Description of Artificial Sequence: Synthetic polynucleotide"
  source 1..2208: mol_type = other DNA
atggctgccgatggttatcttccagattggctcgaggacactctctctgaaggaataagacagtggtggaagctcaaacctggcccaccaccgccaaagcccgcagagcggcacaaggacgacagtaggggtcttgtgcttcctgggtacaagtacctcggacccttcaacggactcgacaaaggagagccggtcaacgaggcagacgccgcggccctcgagcacgacaaggcctacgaccggcagctcgacagcggagacaacccgtacctcaagtacaaccacgccgacgcggagtttcaggagcgtcttaaagaagatacgtcttttgggggcaacctcggacgagcagtattccaggcgaaaaagagggttcttgaacctctgggcctggttgaggagcctgttaagacggctccgggaaaaaagaggccggtagagcactctcctgtggagccagactcctcctcgggaaccggaaaagcgggccagcagcctgcaagaaaaagattgaattttggtcagactggagacgcagactccgtacctgacccccagcctctcggacagccaccagcagcccccacaagtttgggatctactacaatggctacaggcagtggcgcaccaatggcagacaataacgagggtgccgatggagtgggtaattcctcaggaaattggcattgcgattcccaatggctgggcgacagagtcatcaccaccagcacccgaacctgggccctgcccacctacaacaaccacctctacaagcaaatctccagccaatcaggagcatcgaacgacaaccactactttggccacagcaccccttgggggtattttgacttcaacagattccactgtcacttctccccacgtgactggcaaagactcatcaacaacaactggggattccgacccaagagactcaacttcaagctctttaacattcaagtcaaagaggtcacgcagaatgacggtacgacgacgattgccaataaccttaccagcacggttcaggtgtttactgactcggagtaccagctcccgtacgtcctcggctcggcgcatcaaggatgcctcccgccgttcccagcagacgtcttcatggtcccacagtatggatacctcaccctgaacaacgggagtcaggcggtaggacgctcttccttttactgcctggagtactttccttctcagatgcttcgtaccggaaacaactttaccttcagctacacctttgaagacgtgcctttccacagtagctacgctcacagccagagtctggatcggctgatgaatcctcttatcgaccagtacctgtattatctaaacaaaacacaatcaaatagtggaactcttcggcagtctcggctactgtttagtcaagctggacccaccagcatgtctcttcaagctaaaaactggctgcctggaccttgctacagacaacagcgtctgtcaaagcaggcaaacgacaacaacaacagcaactttccctggactgcggctacaaagtatcatctaaatggccgggactcgttggttaatccaggaccagctatggccagccacaaagacgatgaagaaaagtttttccccatgcatggaaccctgatatttggtaaacaaggaacaaatgctaacgacgcggatttggacaatgtcatgattacagatgaagaagaaatccgcaccaccaatcccgtggctacggagcagtacgggactgtgtcaaataatttgcaaaactcaaatactggtccaactactggaactgtcaatcaccaaggagcgttacctggtatggtgtggcaggatcgagacgtgtacctgcagggacccatttgggccaagattcctcacaccgatggacactttcatccttctccactgatgggaggttttggactcaaacacccgcctcctcagatcatgatcaaaaacactcccgttccagccaatcctcctacaaacttcagttctgccaagtttgcttccttcatcacacagtattccacgggacaagtcagcgtggagattgagtgggagctgcagaaggagaacagcaaacgctggaaccccgagatccagtacacttccaactacaacaaatctgttaatgtggactttactgtggacactaatggcgtgtattcagagcctcgccccattggcaccagatacctgactcgtaatctgtaa

SEQ ID NO: 4529 - DNA, 2208 bp, synthetic construct
  misc_feature 1..2208: note = source = /note="Description of Artificial Sequence: Synthetic polynucleotide"
  source 1..2208: mol_type = other DNA
atggctgccgatggttatcttccagattggctcgaggacactctctctgaaggaataagacagtggtggaagctcaaacctggcccaccaccgccaaagcccgcagagcggcacaaggacgacagtaggggtcttgtgcttcctgggtacaagtacctcggacccttcaacggactcgacaaaggagagccggtcaacgaggcagacgccgcggccctcgagcacgacaaggcctacgaccggcagctcgacagcggagacaacccgtacctcaagtacaaccacgccgacgcggagtttcaggagcgtcttaaagaagatacgtcttttgggggcaacctcggacgagcagtattccaggcgaaaaagagggttcttgaacctctgggcctggttgaggagcctgttaagacggctccgggaaaaaagaggccggtagagcactctcctgtggagccagactcctcctcgggaaccggaaaagcgggccagcagcctgcaagaaaaagattgaattttggtcagactggagacgcagactccgtacctgacccccagcctctcggacagccaccagcagcccccacaagtttgggatctactacaatggctacaggcagtggcgcaccaatggcagacaataacgagggtgccgatggagtgggtaattcctcaggaaattggcattgcgattcccaatggctgggcgacagagtcatcaccaccagcacccgaacctgggccctgcccacctacaacaaccacctctacaagcaaatctccagccaatcaggagcatcgaacgacaaccactactttggccacagcaccccttgggggtattttgacttcaacagattccactgtcacttctccccacgtgactggcaaagactcatcaacaacaactggggattccgacccaagagactcaacttcaagctctttaacattcaagtcaaagaggtcacgcagaatgacggtacgacgacgattgccaataaccttaccagcacggttcaggtgtttactgactcggagtaccagctcccgtacgtcctcggctcggcgcatcaaggatgcctcccgccgttcccagcagacgtcttcatggtcccacagtatggatacctcaccctgaacaacgggagtcaggcggtaggacgctcttccttttactgcctggagtactttccttctcagatgcttcgtaccggaaacaactttaccttcagctacacctttgaagacgtgcctttccacagtagctacgctcacagccagagtctggatcggctgatgaatcctcttatcgaccagtacctgtattatctaaacaaaacacaatcaaatagtggaactcttcagcagtctcggctactgtttagtcaagctggacccaccagcatgtctcttcaagctaaaaactggctgcctggaccttgctacagacaacagcgtctgtcaaagcaggcaaacgacaacaacaacagcaactttccctggactgcggctacaaagtatcatctaaatggccgggactcgttggttaatccaggaccagctatggccagccacaaagacgatgaagaaaagtttttccccatgcatggaaccctgatatttggtaaacaaggaacaaatgctaacgacgcggatttggacaatgtcatgattacagatgaagaagaaatccgcaccaccaatcccgtggctacggagcagtacgggactgtgtcaaataatttgcaaaactcaaatactggtccaactactggaactgtcaatcgccaaggagcgttacctggtatggtgtggcaggatcgagacgtgtacctgcagggacccatttgggccaagattcctcacaccgatggacactttcatccttctccactgatgggaggttttggactcaaacacccgcctcctcagatcatgatcaaaaacactcccgttccagccaatcctcctacaaacttcagttctgccaagtttgcttccttcatcacacagtattccacgggacaagtcagcgtggagattgagtgggagctgcagaaggagaacagcaaacgctggaaccccgagatccagtacacttccaactacaacaaatctgttaatgtggactttactgtggacactaatggcgtgtattcagagcctcgccccattggcaccagatacctgactcgtaatctgtaa

SEQ ID NO: 4530 - DNA, 2208 bp, synthetic construct
  misc_feature 1..2208: note = source = /note="Description of Artificial Sequence: Synthetic polynucleotide"
  source 1..2208: mol_type = other DNA
atggctgccgatggttatcttccagattggctcgaggacactctctctgaaggaataagacagtggtggaagctcaaacctggcccaccaccgccaaagcccgcagagcggcacaaggacgacagtaggggtcttgtgcttcctgggtacaagtacctcggacccttcaacggactcgacaaaggagagccggtcaacgaggcagacgccgcggccctcgagcacgacaaggcctacgaccggcagctcgacagcggagacaacccgtacctcaagtacaaccacgccgacgcggagtttcaggagcgtcttaaagaagatacgtcttttgggggcaacctcggacgagcagtattccaggcgaaaaagagggttcttgaacctctgggcctggttgaggagcctgttaagacggctccgggaaaaaagaggccggtagagcactctcctgtggagccagactcctcctcgggaaccggaaaagcgggccagcagcctgcaagaaaaagattgaattttggtcagactggagacgcagactccgtacctgacccccagcctctcggacagccaccagcagcccccacaagtttgggatctactacaatggctacaggcagtggcgcaccaatggcagacaataacgagggtgccgatggagtgggtaattcctcaggaaattggcattgcgattcccaatggctgggcgacagagtcatcaccaccagcacccgaacctgggccctgcccacctacaacaaccacctctacaagcaaatctccagccaatcaggagcatcgaacgacaaccactactttggccacagcaccccttgggggtattttgacttcaacagattccactgtcacttctccccacgtgactggcaaagactcatcaacaacaactggggattccgacccaagagactcaacttcaagctctttaacattcaagtcaaagaggtcacgcagaatgacggtacgacgacgattgccaataaccttaccagcacggttcaggtgtttactgactcggagtaccagctcccgtacgtcctcggctcggcgcatcaaggatgcctcccgccgttcccagcagacgtcttcatggtcccacagtatggatacctcaccctgaacaacgggagtcaggcggtaggacgctcttccttttactgcctggagtactttccttctcagatgcttcgtaccggaaacaactttaccttcagctacacctttgaagacgtgcctttccacagtagctacgctcacagccagagtctggatcggctgatgaatcctcttatcgaccagtacctgtattatctaaacaaaacacaatcaaatagtggaactcttcagcagtctcggctactgtttagtcaagctggacccaccagcatgtctcttcaagctaaaaactggctgcctggaccttgctacagacaacagcgtctgtcaaagcaggcaaacgacaacaacaacggcaactttccctggactgcggctacaaagtatcatctaaatggccgggactcgttggttaatccaggaccagctatggccagccacaaagacgatgaagaaaagtttttccccatgcatggaaccctgatatttggtaaacaaggaacaaatgctaacgacgcggatttggacaatgtcatgattacagatgaagaagaaatccgcaccaccaatcccgtggctacggagcagtacgggactgtgtcaaataatttgcaaaactcaaatactggtccaactactggaactgtcaatcaccaaggagcgttacctggtatggtgtggcaggatcgagacgtgtacctgcagggacccatttgggccaagattcctcacaccgatggacactttcatccttctccactgatgggaggttttggactcaaacacccgcctcctcagatcatgatcaaaaacactcccgttccagccaatcctcctacaaacttcagttctgccaagtttgcttccttcatcacacagtattccacgggacaagtcagcgtggagattgagtgggagctgcagaaggagaacagcaaacgctggaaccccgagatccagtacacttccaactacaacaaatctgttaatgtggactttactgtggacactaatggcgtgtattcagagcctcgccccattggcaccagatacctgactcgtaatctgtaa

SEQ ID NO: 4531 - DNA, 2208 bp, synthetic construct
  misc_feature 1..2208: note = source = /note="Description of Artificial Sequence: Synthetic polynucleotide"
  source 1..2208: mol_type = other DNA
atggctgccgatggttatcttccagattggctcgaggacactctctctgaaggaataagacagtggtggaagctcaaacctggcccaccaccgccaaagcccgcagagcggcacaaggacgacagtaggggtcttgtgcttcctgggtacaagtacctcggacccttcaacggactcgacaaaggagagccggtcaacgaggcagacgccgcggccctcgagcacgacaaggcctacgaccggcagctcgacagcggagacaacccgtacctcaagtacaaccacgccgacgcggagtttcaggagcgtcttaaagaagatacgtcttttgggggcaacctcggacgagcagtattccaggcgaaaaagagggttcttgaacctctgggcctggttgaggagcctgttaagacggctccgggaaaaaagaggccggtagagcactctcctgtggagccagactcctcctcgggaaccggaaaagcgggccagcagcctgcaagaaaaagattgaattttggtcagactggagacgcagactccgtacctgacccccagcctctcggacagccaccagcagcccccacaagtttgggatctactacaatggctacaggcagtggcgcaccaatggcagacaataacgagggtgccgatggagtgggtaattcctcaggaaattggcattgcgattcccaatggctgggcgacagagtcatcaccaccagcacccgaacctgggccctgcccacctacaacaaccacctctacaagcaaatctccagccaatcaggagcatcgaacgacaaccactactttggccacagcaccccttgggggtattttgacttcaacagattccactgtcacttctccccacgtgactggcaaagactcatcaacaacaactggggattccgacccaagagactcaacttcaagctctttaacattcaagtcaaagaggtcacgcagaatgacggtacgacgacgattgccaataaccttaccagcacggttcaggtgtttactgactcggagtaccagctcccgtacgtcctcggctcggcgcatcaaggatgcctcccgccgttcccagcagacgtcttcatggtcccacagtatggatacctcaccctgaacaacgggagtcaggcggtaggacgctcttccttttactgcctggagtactttccttctcagatgcttcgtaccggaaacaactttaccttcagctacacctttgaagacgtgcctttccacagtagctacgctcacagccagagtctggatcggctgatgaatcctcttatcgaccagtacctgtattatctaaacaaaacacaatcaaatagtggaactcttcagcagtctcggctactgtttagtcaagctggacccaccagcatgtctcttcaagctaaaaactggctgcctggaccttgctacagacaacagcgtctgtcaaagcaggcaaacgacaacaacaacagcaactttccctggactgcggctacaaagtatcatctaaatggccgggactcgttggttaatccaggaccagctatggccagccacaaagacgatgaagaaaagtttttccccatgcatggaaccctgatatttggtaaacaaggaacaaatgctaacgacgcggatttggacaatgtcatgattacagatgaagaagaaatccgcaccaccaatcccgtggctacggagcagtacgggactgtgtcaaataatttgcaaaactcaaatactggtccaactactggaactgtcaatcaccaaggagcgttacctggtatggtgtggcaggatcgagacgtgtacctgcagggacccatttgggccaagattcctcacaccgatggacactttcatccttctccactgatgggaggttttggactcaaacacccgcctcctcagatcatgatcaaaaacactcccgttccagccaatcctcctacaaacttcagttctgccaagtttgcttccttcatcacacagtattccacgggacaagtcagcgtggagattgagtgggagctgcagaaggagaacggcaaacgctggaaccccgagatccagtacacttccaactacaacaaatctgttaatgtggactttactgtggacactaatggcgtgtattcagagcctcgccccattggcaccagatacctgactcgtaatctgtaa

SEQ ID NO: 4532 - DNA, 2208 bp, synthetic construct
  misc_feature 1..2208: note = source = /note="Description of Artificial Sequence: Synthetic polynucleotide"
  source 1..2208: mol_type = other DNA
atggctgccgatggttatcttccagattggctcgaggacgctctctctgaaggaataagacagtggtggaagctcaaacctggcccaccaccgccaaagcccgcagagcggcacaaggacgacagtaggggtcttgtgcttcctgggtacaagtacctcggacccttcaacggactcgacaaaggagagccggtcaacgaggcagacgccgcggccctcgagcacgacaaggcctacgaccggcagctcgacagcggagacaacccgtacctcaagtacaaccacgccgacgcggagtttcaggagcgtcttaaagaagatacgtcttttgggggcaacctcggacgagcagtattccaggcgaaaaagagggttcttgaacctctgggcctggttgaggagcctgttaagacggctccgggaaaaaagaggccggtagagcactctcctgtggagccagactcctcctcgggaaccggaaaagcgggccagcagcctgcaagaaaaagattgaattttggtcagactggagacgcagactccgtacctgacccccagcctctcggacagccaccagcagcccccacaagtttgggatctactacaatggctacaggcagtggcgcaccaatggcagacaataacgagggtgccgatggagtgggtaattcctcaggaaattggcattgcgattcccaatggctgggcgacagagtcatcaccaccagcacccgaacctgggccctgcccacctacaacaaccacctctacaagcaaatctccagccaatcaggagcatcgaacgacaaccactactttggccacagcaccccttgggggtattttgacttcaacagattccactgtcacttctccccacgtgactggcaaagactcatcaacaacaactggggattccgacccaagagactcaacttcaagctctttaacattcaagtcaaagaggtcacgcagaatgacggtacgacgacgattgccaataaccttaccagcacggttcaggtgtttactgactcggagtaccagctcccgtacgtcctcggctcggcgcatcaaggatgcctcccgccgttcccagcagacgtcttcatggtcccacagtatggatacctcaccctgaacaacgggagtcaggcggtaggacgctcttccttttactgcctggagtactttccttctcagatgcttcgtaccggaaacaactttaccttcagctacacctttgaagacgtgcctttccacagtagctacgctcacagccagagtctggatcggctgatgaatcctcttatcgaccagtacctgtattatctaaacaaaacacaatcaaatagtggaactcttcagcagtctcggctactgtttagtcaagctggacccaccagcatgtctcttcaagctaaaaactggctgcctggaccttgctacagacaacagcgtctgtcaaagcaggcaaacgacaacaacaacagcaactttccctggactgcggctacaaagtatcatctaaatggccgggactcgttggttaatccaggaccagctatggccagccacaaagacgatgaagaaaagtttttccccatgcatggaaccctgatatttggtaaacaaggaacaaatgctaacgacgcggatttggacaatgtcatgattacagatgaagaagaaatccgcaccaccaatcccgtggctacggagcagtacgggactgtgtcaaataatttgcaaaactcaaatactggtccaactactggaactgtcaatcaccaaggagcgttacctggtatggtgtggcaggatcgagacgtgtacctgcagggacccatttgggccaagattcctcacaccgatggacactttcatccttctccactgatgggaggttttggactcaaacacccgcctcctcagatcatgatcaaaaacactcccgttccagccaatcctcctacaaacttcagttctgccaagtttgcttccttcatcacacagtattccacgggacaagtcagcgtggagattgagtgggagctgcagaaggagaacagcaaacgctggaaccccgagatccagtacacttccaactacaacaaatctgttaatgtggactttactgtggacactaatggcgtgtattcagagcctcgccccattggcaccagatacctgactcgtaatctgtaa

SEQ ID NO: 4533 - DNA, 2208 bp, synthetic construct
  misc_feature 1..2208: note = source = /note="Description of Artificial Sequence: Synthetic polynucleotide"
  source 1..2208: mol_type = other DNA
atggctgccgatggttatcttccagattggctcgaggacactctctctgaaggaataagacagtggtggaagctcaaacctggcccaccaccgccaaagcccgcagagcggcacaaggacgacagtaggggtcttgtgcttcctgggtacaagtacctcggacccttcaacggactcgacaaaggagagccggtcaacgaggcagacgccgcggccctcgagcacgacaaggcctacgaccggcagctcgacagcggagacaacccgtacctcaagtacaaccacgccgacgcggagtttcaggagcgtcttaaagaagatacgccttttgggggcaacctcggacgagcagtattccaggcgaaaaagagggttcttgaacctctgggcctggttgaggagcctgttaagacggctccgggaaaaaagaggccggtagagcactctcctgtggagccagactcctcctcgggaaccggaaaagcgggccagcagcctgcaagaaaaagattgaattttggtcagactggagacgcagactccgtacctgacccccagcctctcggacagccaccagcagcccccacaagtttgggatctactacaatggctacaggcagtggcgcaccaatggcagacaataacgagggtgccgatggagtgggtaattcctcaggaaattggcattgcgattcccaatggctgggcgacagagtcatcaccaccagcacccgaacctgggccctgcccacctacaacaaccacctctacaagcaaatctccagccaatcaggagcatcgaacgacaaccactactttggccacagcaccccttgggggtattttgacttcaacagattccactgtcacttctccccacgtgactggcaaagactcatcaacaacaactggggattccgacccaagagactcaacttcaagctctttaacattcaagtcaaagaggtcacgcagaatgacggtacgacgacgattgccaataaccttaccagcacggttcaggtgtttactgactcggagtaccagctcccgtacgtcctcggctcggcgcatcaaggatgcctcccgccgttcccagcagacgtcttcatggtcccacagtatggatacctcaccctgaacaacgggagtcaggcggtaggacgctcttccttttactgcctggagtactttccttctcagatgcttcgtaccggaaacaactttaccttcagctacacctttgaagacgtgcctttccacagtagctacgctcacagccagagtctggatcggctgatgaatcctcttatcgaccagtacctgtattatctaaacaaaacacaatcaaatagtggaactcttcagcagtctcggctactgtttagtcaagctggacccaccagcatgtctcttcaagctaaaaactggctgcctggaccttgctacagacaacagcgtctgtcaaagcaggcaaacgacaacaacaacagcaactttccctggactgcggctacaaagtatcatctaaatggccgggactcgttggttaatccaggaccagctatggccagccacaaagacgatgaagaaaagtttttccccatgcatggaaccctgatatttggtaaacaaggaacaaatgctaacgacgcggatttggacaatgtcatgattacagatgaagaagaaatccgcaccaccaatcccgtggctacggagcagtacgggactgtgtcaaataatttgcaaaactcaaatactggtccaactactggaactgtcaatcaccaaggagcgttacctggtatggtgtggcaggatcgagacgtgtacctgcagggacccatttgggccaagattcctcacaccgatggacactttcatccttctccactgatgggaggttttggactcaaacacccgcctcctcagatcatgatcaaaaacactcccgttccagccaatcctcctacaaacttcagttctgccaagtttgcttccttcatcacacagtattccacgggacaagtcagcgtggagattgagtgggagctgcagaaggagaacagcaaacgctggaaccccgagatccagtacacttccaactacaacaaatctgttaatgtggactttactgtggacactaatggcgtgtattcagagcctcgccccattggcaccagatacctgactcgtaatctgtaa

SEQ ID NO: 4534 - protein, 743 aa, synthetic construct
  REGION 1..743: note = source = /note="Description of Artificial Sequence: Synthetic polypeptide"
MAADGYLPDWLEDNLSEGIREWWALKPGAPQPKANQQHQDNARGLVLPGYKYLGPGNGLDKGEPVNAADAAALEHDKAYDQQLKAGDNPYLKYNHADAEFQERLKEDTSFGGNLGRAVFQAKKRLLEPLGLVEEAAKTAPGKKRPVEQSPQEPDSSAGIGKSGAQPAKKRLNFGQTGDTESVPDPQPIGEPPAAPSGVGSLTMASGGGAPVADNNEGADGVGSSSGNWHCDSQWLGDRVITTSTRTWALPTYNNHLYKQISNSTSGGSSNDNAYFGYSTPWGYFDFNRFHCHFSPRDWQRLINNNWGFRPKRLNFKLFNIQVKEVTDNNGVKTIANNLTSTVQVFTDSDYQLPYVLGSAHEGCLPPFPADVFMIPQYGYLTLNDGSQAVGRSSFYCLEYFPSQMLRTGNNFQFSYEFENVPFHSSYAHSQSLDRLMNPLIDQYLYYLSKTINGSGQNQQTLKFSVAGPSNMAVQGRNYIPGPSYRQQRVSTTVTQNNNSEFAWPGASSWALNGRNSLMNPGPAMASHKEGEDRFFPLSGSLIFGKQGTGRDNVDADKVMITNEEEIKTTNPVATESYGQVATNHQSAQTLAVPFKAQAQTGWVQNQGILPGMVWQDRDVYLQGPIWAKIPHTDGNFHPSPLMGGFGMKHPPPQILIKNTPVPADPPTAFNKDKLNSFITQYSTGQVSVEIEWELQKENSKRWNPEIQYTSNYYKSNNVEFAVNTEGVYSEPRPIGTRYLTRNL

SEQ ID NO: 4535 - protein, 5 aa, synthetic construct
  REGION 1..5: note = source = /note="Description of Artificial Sequence: Synthetic peptide"
GGGGS

SEQ ID NO: 4536 - protein, 6 aa, synthetic construct
  REGION 1..6: note = source = /note="Description of Artificial Sequence: Synthetic peptide"
SGGGGS

SEQ ID NO: 4537 - protein, 15 aa, synthetic construct
  REGION 1..15: note = source = /note="Description of Artificial Sequence: Synthetic peptide"
GGGGSGGGGSGGGGS

SEQ ID NO: 4538 - protein, 25 aa, synthetic construct
  REGION 1..25: note = source = /note="Description of Artificial Sequence: Synthetic peptide"
GGGGSGGGGSGGGGSGGGGSGGGGS

SEQ ID NO: 4539 - protein, 10 aa, synthetic construct
  REGION 1..10: note = source = /note="Description of Artificial Sequence: Synthetic peptide"
GGGGSGGGGS

SEQ ID NO: 4540 - protein, 20 aa, synthetic construct
  REGION 1..20: note = source = /note="Description of Artificial Sequence: Synthetic peptide"
GGGGSGGGGSGGGGSGGGGS

SEQ ID NO: 4541 - protein, 30 aa, synthetic construct
  REGION 1..30: note = source = /note="Description of Artificial Sequence: Synthetic polypeptide"
GGGGSGGGGSGGGGSGGGGSGGGGSGGGGS

SEQ ID NO: 4542 - protein, 40 aa, synthetic construct
  REGION 1..40: note = source = /note="Description of Artificial Sequence: Synthetic polypeptide"
GGGGSGGGGSGGGGSGGGGSGGGGSGGGGSGGGGSGGGGS

SEQ ID NO: 4543 - DNA, 11 bp, synthetic construct
  misc_feature 1..11: note = source = /note="Description of Artificial Sequence: Synthetic oligonucleotide"
  source 1..11: mol_type = other DNA
gaggagccacc

SEQ ID NO: 4544 - protein, 50 aa, synthetic construct
  SITE 1..50: note = /note="This sequence may encompass 1-10 'Gly Gly Gly Gly Ser' repeating units"
  REGION 1..50: note = source = /note="Description of Artificial Sequence: Synthetic polypeptide"
GGGGSGGGGSGGGGSGGGGSGGGGSGGGGSGGGGSGGGGSGGGGSGGGGS

SEQ ID NO: 4545 - protein, 4 aa, unidentified
  REGION 1..4: note = source = /note="Description of Unknown: 'KDEL' ER retention motif"
KDEL

SEQ ID NO: 4546 - protein, 6 aa, unidentified
  REGION 1..6: note = source = /note="Description of Unknown: 'SEKDEL' ER retention motif"
SEKDEL
